(19) United States
(12) Patent Application Publication
(10) Pub. No.: US 2006/0292564 A1
(43) Pub. Date: Dec. 28, 2006

(54) Method and nucleic acids for the analysis of breast cell proliferative disorders

(75) Inventor: Sabine Maier, Berlin (DE)

Correspondence Address: DAVIS WRIGHT TREMAINE, LLP, 2600 CENTURY SQUARE, 1501 FOURTH AVENUE, SEATTLE, WA, 98101-1688, US

(73) Assignee: Epigenomics AG, Berlin (DE)

(21) Appl. No.: 10/526,108

(22) PCT Filed: Jul. 18, 2003
(86) PCT No.: PCT/EP03/07827

§ 371 Date: May 10, 2006

(30) Foreign Application Priority Data
Aug. 27, 2002 (DE) 10239313.3
Nov. 26, 2002 (DE) 10255104.9

(51) Int. Cl. C12Q 1/68; C12M 1/34

(52) U.S. Cl. 435/6; 435/287.2

(57) ABSTRACT

The present invention relates to modified and genomic sequences, to oligonucleotides and/or PNA-oligomers for detecting the cytosine methylation state of genomic DNA, as well as to a method for ascertaining genetic and/or epigenetic parameters of genes for use in the differentiation, diagnosis, treatment and/or monitoring of breast cell proliferative disorders, or the predisposition to breast cell proliferative disorders.

### FIELD OF THE INVENTION

[0001] Breast cancer is currently the second most common type of cancer amongst women. In 2001 over 190,000 new cases of invasive breast cancer and over 47,000 additional cases of in situ breast cancer were diagnosed. Incidence and death rates increase with age, for the period 1994-1998 the incidence of breast cancer amongst women between the ages of 20 and 24 was only 1.5 per 100,000 population. However the risk increases to 489.7 within the age group 75-79. Mortality rates have decreased by approximately 5% over the last decade and factors affecting 5 year survival rates include age, stage of cancer, socioeconomic factors and race.

[0002] Breast cancer is defined as the uncontrolled proliferation of cells within breasts tissues. Breasts are comprised of 15 to 20 lobes joined together by ducts. Cancer arises most commonly in the duct, but is also found in the lobes with the rarest type of cancer termed inflammatory breast cancer.

[0003] It will be appreciated by those skilled in the art that there exists a continuing need to improve methods of early detection, classification and treatment of breast cancers. In contrast to the detection of some other common cancers such as cervical and dermal there are inherent difficulties in classifying and detecting breast cancers.

[0004] The first step of any treatment is the assessment of the patient's condition comparative to defined classifications of the disease. However the value of such a system is inherently dependant upon the quality of the classification. Breast cancers are staged according to their size, location and occurrence of metastasis. Methods of treatment include the use of surgery, radiation therapy, chemotherapy and hormone therapy, which are also used as adjuvant therapies to surgery.

[0005] Predictors currently used in the assessment of breast tumours (e.g. histological analysis, estrogen receptor markers) often fail to correctly predict or classify tumour development and behaviour. Therefore, patient response to treatment and prediction of overall outcome is often not accurately predictable. The continued development of breast cancer analysis techniques is currently focused upon the investigation molecular biological markers.

[0006] The development of molecular biological markers as an alternative to traditional histopathological analysis has to date focused on the analysis of single nucleotide polymorphisms and single genes, such as BRCA1 and BRCA 2. Furthermore, in addition to oncogene mutations gene amplification, and loss of heterozygosity in invasive breast cancer (Callahan, et al., 1992; Cheickh, et al., 1992; Chen, et al, 1992; and, Lippman, et al, 1990) have also been assessed. More recently, the use of microarry technology has allowed the concurrent analysis of multiple genes as well as genetic expression profiling by analysis of RNA and proteins. The analysis of multiple loci in order to predict breast cancer risks in populations was discussed by Pharoah et. al. ‘Polygenic susceptibility to breast cancer and implications for prevention’ Nat Genet. 2002 May;31(1):33-6. Furthermore, Friend et. al. (‘Gene expression profiling predicts clinical outcome of breast cancer’ Nature 415, 530-536 (2002)) used gene expression profiling to predict the outcome of treatment in breast cancer patients, their methods may be used to enable improved post surgery treatment decisions.

[0007] However, as hereditary breast cancers only account for 5% to 10% of cases it is likely that epigenetic mechanisms, as well as hereditary mutations and environmental factors influence the development of breast cancers.

[0008] The levels of observation that have been studied by the methodological developments of recent years in molecular biology, are the genes themselves, the translation of these genes into RNA, and the resulting proteins. The question of which gene is switched on at which point in the course of the development of an individual, and how the activation and inhibition of specific genes in specific cells and tissues are controlled is correlatable to the degree and character of the methylation of the genes or of the genome. In this respect, pathogenic conditions may manifest themselves in a changed methylation pattern of individual genes or of the genome.

[0009] DNA methylation plays a role, for example, in the regulation of the transcription, in genetic imprinting, and in tumorigenesis. Therefore, the identification of 5-methylcytosine as a component of genetic information is of considerable interest. However, 5-methylcytosine positions cannot be identified by sequencing since 5-methylcytosine has the same base pairing behaviour as cytosine. Moreover, the epigenetic information carried by 5-methylcytosine is completely lost during PCR amplification.

[0010] A relatively new and currently the most frequently used method for analyzing DNA for 5-methylcytosine is based upon the specific reaction of bisulfite with cytosine which, upon subsequent alkaline hydrolysis, is converted to uracil which corresponds to thymidine in its base pairing behaviour. However, 5-methylcytosine remains unmodified under these conditions. Consequently, the original DNA is converted in such a manner that methylcytosine, which originally could not be distinguished from cytosine by its hybridisation behaviour, can now be detected as the only remaining cytosine using “normal” molecular biological techniques, for example, by amplification and hybridisation or sequencing. All of these techniques are based on base pairing which can now be fully exploited. In terms of sensitivity, the prior art is defined by a method which encloses the DNA to be analysed in an agarose matrix, thus preventing the diffusion and renaturation of the DNA (bisulfite only reacts with single-stranded DNA), and which replaces all precipitation and purification steps with fast dialysis (Olek A, Oswald J, Walter J. A modified and improved method for bisulphite based cytosine methylation analysis. Nucleic Acids Res. 1996 Dec. 15;24(24):5064-6). Using this method, it is possible to analyse individual cells, which illustrates the potential of the method. However, currently only individual regions of a length of up to approximately 3000 base pairs are analysed, a global analysis of cells for thousands of possible methylation events is not possible. However, this method cannot reliably analyse very small fragments from small sample quantities either. These are lost through the matrix in spite of the diffusion protection.

[0011] An overview of the further known methods of detecting 5-methylcytosine may be gathered from the following review article: Rein, T., DePamphilis, M. L., Zorbas, H., Nucleic Acids Res. 1998, 26, 2255.

[0012] To date, barring few exceptions (e.g., Zeschnigk M, Lich C, Buiting K, Doerfler W, Horsthemke B. A single-tube PCR test for the diagnosis of Angelman and Prader-Willi syndrome based on allelic methylation differences at the SNRPN locus. Eur J Hum Genet. 1997 March-April;5(2):94-8) the bisulfite technique is only used in research. Always, however, short, specific fragments of a known gene are amplified subsequent to a bisulfite treatment and either completely sequenced (Olek A, Walter J. The pre-implantation ontogeny of the H19 methylation imprint. Nat Genet. 1997 November;17(3):275-6) or individual cytosine positions are detected by a primer extension reaction (Gonzalgo M L, Jones P A. Rapid quantitation of methylation differences at specific sites using methylation-sensitive single nucleotide primer extension (Ms-SNuPE). Nucleic Acids Res. 1997 Jun. 15;25(12):2529-31, WO 95/00669) or by enzymatic digestion (Xiong Z, Laird P W. COBRA: a sensitive and quantitative DNA methylation assay. Nucleic Acids Res. 1997 Jun. 15;25(12):2532-4). In addition, detection by hybridisation has also been described (Olek et al., WO 99/28498).

[0013] Further publications dealing with the use of the bisulfite technique for methylation detection in individual genes are: Grigg G, Clark S. Sequencing 5-methylcytosine residues in genomic DNA. Bioessays. 1994 June; 16(6):431-6, 431; Zeschnigk M, Schmitz B, Dittrich B, Buiting K, Horsthemke B, Doerfler W. Imprinted segments in the human genome: different DNA methylation patterns in the Prader-Willi/Angelman syndrome region as determined by the genomic sequencing method. Hum Mol Genet. 1997 March;6(3):387-95; Feil R, Charlton J, Bird A P, Walter J, Reik W. Methylation analysis on individual chromosomes: improved protocol for bisulphite genomic sequencing. Nucleic Acids Res. 1994 Feb. 25;22(4):695-6; Martin V, Ribieras S, Song-Wang X, Rio M C, Dante R. Genomic sequencing indicates a correlation between DNA hypomethylation in the 5′ region of the pS2 gene and its expression in human breast cancer cell lines. Gene. 1995 May 19;157(1-2):261-4; WO 97/46705, WO 95/15373 and WO 97/45560.

[0014] An overview of the Prior Art in oligomer array manufacturing can be gathered from a special edition of Nature Genetics (Nature Genetics Supplement, Volume 21, January 1999), published in January 1999, and from the literature cited therein.

[0015] Fluorescently labelled probes are often used for the scanning of immobilised DNA arrays. The simple attachment of Cy3 and Cy5 dyes to the 5′-OH of the specific probe are particularly suitable for fluorescence labels. The detection of the fluorescence of the hybridised probes may be carried out, for example via a confocal microscope. Cy3 and Cy5 dyes, besides many others, are commercially available.

[0016] Matrix Assisted Laser Desorption Ionisation Mass Spectrometry (MALDI-TOF) is a very efficient development for the analysis of biomolecules (Karas M, Hillenkamp F. Laser desorption ionisation of proteins with molecular masses exceeding 10,000 daltons. Anal Chem. 1988 Oct. 15;60(20):2299-301). An analyte is embedded in a light-absorbing matrix. The matrix is evaporated by a short laser pulse thus transporting the analyte molecule into the vapour phase in an unfragmented manner. The analyte is ionised by collisions with matrix molecules. An applied voltage accelerates the ions into a field-free flight tube. Due to their different masses, the ions are accelerated at different rates. Smaller ions reach the detector sooner than bigger ones.

[0017] MALDI-TOF spectrometry is excellently suited to the analysis of peptides and proteins. The analysis of nucleic acids is somewhat more difficult (Gut I G, Beck S. DNA and Matrix Assisted Laser Desorption Ionisation Mass Spectrometry. Current Innovations and Future Trends. 1995, 1; 147-57). The sensitivity to nucleic acids is approximately 100 times worse than to peptides and decreases disproportionally with increasing fragment size. For nucleic acids having a multiply negatively charged backbone, the ionisation process via the matrix is considerably less efficient. In MALDI-TOF spectrometry, the selection of the matrix plays an eminently important role. For the desorption of peptides, several very efficient matrixes have been found which produce a very fine crystallisation. There are now several responsive matrixes for DNA, however, the difference in sensitivity has not been reduced. The difference in sensitivity can be reduced by chemically modifying the DNA in such a manner that it becomes more similar to a peptide. Phosphorothioate nucleic acids in which the usual phosphates of the backbone are substituted with thiophosphates can be converted into a charge-neutral DNA using simple alkylation chemistry (Gut I G, Beck S. A procedure for selective DNA alkylation and detection by mass spectrometry. Nucleic Acids Res. 1995 Apr. 25;23(8):1367-73). The coupling of a charge tag to this modified DNA results in an increase in sensitivity to the same level as that found for peptides. A further advantage of charge tagging is the increased stability of the analysis against impurities which make the detection of unmodified substrates considerably more difficult.

[0018] Genomic DNA is obtained from DNA of cell, tissue or other test samples using standard methods. This standard methodology is found in references such as Fritsch and Maniatis eds., Molecular Cloning: A Laboratory Manual, 1989.

### DESCRIPTION

[0019] The invention provides a method and nucleic acids for the analysis of biological samples for features associated with the development of breast cell proliferative disorders. The invention is characterised in that the nucleic acid of at least one member of the group of genes according to Table 1 is/are contacted with a reagent or series of reagents capable of distinguishing between methylated and non methylated CpG dinucleotides within the genomic sequence of interest.

[0020] The present invention makes available a method for ascertaining genetic and/or epigenetic parameters of genomic DNA. The method is for use in the improved diagnosis, treatment and monitoring of breast cell proliferative disorders, for example by enabling the improved identification of and differentiation between subclasses of said disorder and the genetic predisposition to said disorders. The invention presents improvements over the state of the art in that it enables a highly specific classification of breast cell proliferative disorders, thereby allowing for improved and informed treatment of patients.

[0021] Furthermore, the method enables the analysis of cytosine methylations and single nucleotide polymorphisms.

[0022] The genes that form the basis of the present invention are preferably to be used to form a “gene panel”, i.e. a collection comprising the particular genetic sequences of the present invention and/or their respective informative methylation sites. The formation of gene panels allows for a quick and specific analysis of specific aspects of breast cancer. The gene panel(s) as described and employed in this invention can be used with surprisingly high efficiency for the diagnosis, treatment and monitoring of and the analysis of a predisposition to breast cell proliferative disorders.

[0023] In addition, the use of multiple CpG sites from a diverse array of genes allows for a relatively high degree of sensitivity and specificity in comparison to single gene diagnostic and detection tools.

[0024] The object of the invention is achieved by means of analysis of the methylation patterns of one or more sequences taken from the group comprising Seq. ID No. 1 through Seq. ID No. 73 and Seq. ID No. 366 according to Table 1. In a preferred embodiment said method is achieved by contacting said nucleic acid sequences in a biological sample obtained from a subject with at least one reagent or a series of reagents, wherein said reagent or series of reagents, distinguishes between methylated and non methylated CpG dinucleotides within the respective target nucleic acid(s), i.e. Seq. ID No. 1 through Seq. ID No. 73 and Seq. ID No. 366.

[0025] In a preferred embodiment, the method comprises the following steps:

[0026] In the first step of the method the genomic DNA sample must be isolated from sources such as cell lines, tissue or blood samples. Extraction may be by means that are standard to one skilled in the art, these include the use of detergent lysates, sonification and vortexing with glass beads. Once the nucleic acids have been extracted the genomic double stranded DNA is used in the analysis.

[0027] In a preferred embodiment the DNA may be cleaved prior to the next step of the method, this may be by any means standard in the state of the art, in particular, but not limited to, with restriction endonucleases.

[0028] In the second step of the method, the genomic DNA sample is treated in such a manner that cytosine bases which are unmethylated at the 5′-position are converted to uracil, thymine, or another base which is dissimilar to cytosine in terms of hybridisation behaviour. This will be understood as ‘pretreatment’ hereinafter.

[0029] The above described treatment of genomic DNA is preferably carried out with bisulfite (sulfite, disulfite) and subsequent alkaline hydrolysis which results in a conversion of non-methylated cytosine nucleobases to uracil or to another base which is dissimilar to cytosine in terms of base pairing behaviour. If bisulfite solution is used for the reaction, then an addition takes place at the non-methylated cytosine bases. Moreover, a denaturating reagent or solvent as well as a radical interceptor must be present. A subsequent alkaline hydrolysis then gives rise to the conversion of non-methylated cytosine nucleobases to uracil. The converted DNA is then used for the detection of methylated cytosines.

[0030] Fragments of the pretreated DNA are amplified, using sets of primer oligonucleotides, and a preferably heat-stable, polymerase. Because of statistical and practical considerations, preferably more than ten different fragments having a length of 100-2000 base pairs are amplified. The amplification of several DNA segments can be carried out simultaneously in one and the same reaction vessel. Usually, the amplification is carried out by means of a polymerase chain reaction (PCR).

[0031] The design of such primers is obvious to one skilled in the art. These should include at least two oligonucleotides whose sequences are each reverse complementary or identical to an at least 18 base-pair long segment of the base sequences specified in the appendix (SEQ ID NO: 74 through SEQ ID NO: 365 and SEQ ID NO: 367 through 370). Said primer oligonucleotides are preferably characterised in that they do not contain any CpG dinucleotides. In a particularly preferred embodiment of the method, the sequence of said primer oligonucleotides are designed so as to selectively anneal to and amplify, only the breast cell specific DNA of interest, thereby minimising the amplification of background or non relevant DNA. In the context of the present invention, background DNA is taken to mean genomic DNA which does not have a relevant tissue specific methylation pattern, in this case, the relevant tissue being breast cells, both healthy and diseased.

[0032] According to the present invention, it is preferred that at least one primer oligonucleotide is bound to a solid phase during amplification. The different oligonucleotide and/or PNA-oligomer sequences can be arranged on a plane solid phase in the form of a rectangular or hexagonal lattice, the solid phase surface preferably being composed of silicon, glass, polystyrene, aluminium, steel, iron, copper, nickel, silver, or gold, it being possible for other materials such as nitrocellulose or plastics to be used as well.

[0033] The fragments obtained by means of the amplification may carry a directly or indirectly detectable label. Preferred are labels in the form of fluorescence labels, radionuclides, or detachable molecule fragments having a typical mass which can be detected in a mass spectrometer, it being preferred that the fragments that are produced have a single positive or negative net charge for better detectability in the mass spectrometer. The detection may be carried out and visualised by means of matrix assisted laser desorption/ionisation mass spectrometry (MALDI) or using electron spray mass spectrometry (ESI).

[0034] In the next step the nucleic acid amplificates are analysed in order to determine the methylation status of the genomic DNA prior to treatment.

[0035] The post treatment analysis of the nucleic acids may be carried out using alternative methods. Several methods for the methylation status specific analysis of the treated nucleic acids are described below, other alternative methods will be obvious to one skilled in the art.

[0036] Using several methods known in the art the analysis may be carried out during the amplification step of the method. In one such embodiment, the methylation status of preselected CpG positions within the nucleic acids comprising Seq. ID No. 1 through Seq. ID No. 73 may be detected by use of methylation specific primer oligonucleotides. This technique has been described in U.S. Pat. No. 6,265,171 to Herman. The use of methylation status specific primers for the amplification of bisulphite treated DNA allows the differentiation between methylated and unmethylated nucleic acids. MSP primers pairs contain at least one primer which hybridises to a bisulphite treated CpG dinucleotide. Therefore the sequence of said primers comprises at least one CG, TG or CA dinucleotide. MSP primers specific for non methylated DNA contain a ‘T’ at the 3′ position of the C position in the CpG. According to the present invention, it is therefore preferred that the base sequence of said primers is required to comprise a sequence having a length of at least 9 nucleotides which hybridises to a pretreated nucleic acid sequence according to Seq. ID No. 74 to Seq. ID No. 365 and sequences complementary thereto wherein the base sequence of said oligomers comprises at least one CG, TG or CA dinucleotide.

[0037] In one embodiment of the method the methylation status of the CpG positions may be determined by means of hybridisation analysis. In this embodiment of the method the amplificates obtained in the second step of the method are hybridised to an array or a set of oligonucleotides and/or PNA probes. In this context, the hybridisation takes place in the manner described as follows. The set of probes used during the hybridisation is preferably composed of at least 4 oligonucleotides or PNA-oligomers. In the process, the amplificates serve as probes which hybridise to oligonucleotides previously bonded to a solid phase. The non-hybridised fragments are subsequently removed. Said oligonucleotides contain at least one base sequence having a length of 10 nucleotides which is reverse complementary or identical to a segment of the base sequences specified in the appendix, the segment containing at least one CpG or TpG dinucleotide. In a further preferred embodiment the cytosine of the CpG dinucleotide, or in the case of TpG, the thiamine, is the 5^{th} to 9^{th} nucleotide from the 5′-end of the 10-mer. One oligonucleotide exists for each CpG or TpG dinucleotide.

[0038] The non-hybridised amplificates are then removed. In the final step of the method, the hybridised amplificates are detected. In this context, it is preferred that labels attached to the amplificates are identifiable at each position of the solid phase at which an oligonucleotide sequence is located.

[0039] In a further embodiment of the method the methylation status of the CpG positions may be ascertained by means of oligonucleotide probes that are hybridised to the treated DNA concurrently with the PCR amplification primers (wherein said primers may either be methylation specific or standard).

[0040] A particularly preferred embodiment of this method is the use of fluorescence-based Real Time Quantitative PCR (Heid et al., Genome Res. 6:986-994, 1996) employing a dual-labelled fluorescent oligonucleotide probe (TaqMan™ PCR, using an ABI Prism 7700 Sequence Detection System, Perkin Elmer Applied Biosystems, Foster City, Calif.). The TaqMan™ PCR reaction employs the use of a nonextendible interrogating oligonucleotide, called a TaqMan™ probe, which is designed to hybridise to a GpC-rich sequence located between the forward and reverse amplification primers. The TaqMan™ probe further comprises a fluorescent “reporter moiety” and a “quencher moiety” covalently bound to linker moieties (e.g., phosphoramidites) attached to the nucleotides of the TaqMan™ oligonucleotide. For analysis of methylation within nucleic acids subsequent to bisulphite treatment it is required that the probe be methylation specific, as described in U.S. Pat. No. 6,331,393, (hereby incorporated by reference) also known as the Methyl Light assay. Variations on the TaqMan™ detection methodology that are also suitable for use with the described invention include the use of dual probe technology (Lightcycler™ or fluorescent amplification primers (Sunrise™ technology). Both these techniques may be adapted in a manner suitable for use with bisulphite treated DNA, and moreover for methylation analysis within CpG dinucleotides.

[0041] A further suitable method for the use of probe oligonucleotides for the assessment of methylation by analysis of bisulphite treated nucleic acids is the use of blocker oligonucleotides. The use of such oligonucleotides has been described in BioTechniques 23(4), 1997, 714-720 D. Yu, M. Mukai, Q. Liu, C. Steinman. Blocking probe oligonucleotides are hybridised to the bisulphite treated nucleic acid concurrently with the PCR primers. PCR amplification of the nucleic acid is terminated at the 5′ position of the blocking probe, thereby amplification of a nucleic acid is suppressed wherein the complementary sequence to the blocking probe is present. The probes may be designed to hybridise to the bisulphite treated nucleic acid in a methylation status specific manner. For example, for detection of methylated nucleic acids within a population of unmethylated nucleic acids suppression of the amplification of nucleic acids which are unmethylated at the position in question would be carried out by the use of blocking probes comprising a ‘CG’ at the position in question, as opposed to a ‘CA’.

[0042] In a further preferred embodiment of the method the determination of the methylation status of the CpG positions is carried out by the use of template directed oligonucleotide extension, such as MS SNuPE as described by Gonzalgo and Jones (Nucleic Acids Res. 25:2529-2531).

[0043] In a further embodiment of the method the determination of the methylation status of the CpG positions is enabled by sequencing and subsequent sequence analysis of the amplificate generated in the second step of the method (Sanger F., et al., 1977 PNAS USA 74: 5463-5467).

[0044] A further embodiment of the invention is a method for the analysis of the methylation status of genomic DNA without the need for pretreatment. In the first and second steps of the method the genomic DNA sample must be obtained and isolated from tissue or cellular sources. Such sources may include cell lines, histological slides, body fluids, or tissue embedded in paraffin. Extraction may be by means that are standard to one skilled in the art, these include the use of detergent lysates, sonification and vortexing with glass beads. Once the nucleic acids have been extracted the genomic double stranded DNA is used in the analysis.

[0045] In a preferred embodiment the DNA may be cleaved prior to the treatment, this may be any means standard in the state of the art, in particular with restriction endonucleases. In the third step, the DNA is then digested with one or more methylation sensitive restriction enzymes. The digestion is carried out such that hydrolysis of the DNA at the restriction site is informative of the methylation status of a specific CpG dinucleotide.

[0046] In a preferred embodiment the restriction fragments are amplified. In a further preferred embodiment this is carried out using the polymerase chain reaction.

[0047] In the final step the amplificates are detected. The detection may be by any means standard in the art, for example, but not limited to, gel electrophoresis analysis, hybridisation analysis, incorporation of detectable tags within the PCR products, DNA array analysis, MALDI or ESI analysis.

[0048] The aforementioned method is preferably used for ascertaining genetic and/or epigenetic parameters of genomic DNA.

[0049] In order to enable this method, the invention further provides the modified DNA of genes according to Table 1, as well as oligonucleotides and/or PNA-oligomers for detecting cytosine methylations within said genes. The present invention is based on the discovery that genetic and epigenetic parameters and, in particular, the cytosine methylation patterns of said genomic DNAs are particularly suitable for improved diagnosis, treatment and monitoring of breast cell proliferative disorders. Furthermore, the invention enables the differentiation between different subclasses of breast cell proliferative disorders or detection of a predisposition to breast cell proliferative disorders.

[0050] The nucleic acids according to the present invention can be used for the analysis of genetic and/or epigenetic parameters of genomic DNA.

[0051] This objective according to the present invention is achieved using a nucleic acid containing a sequence of at least 18 bases in length of the pretreated genomic DNA according to one of SEQ ID NO: 74 through SEQ ID NO: 365 and SEQ ID NO 367 through 370 and sequences complementary thereto.

[0052] The modified nucleic acids could heretofore not be connected with the ascertainment of disease relevant genetic and epigenetic parameters.

[0053] The object of the present invention is further achieved by an oligonucleotide or oligomer for the analysis of pretreated DNA, for detecting the genomic cytosine methylation state, said oligonucleotide containing at least one base sequence having a length of at least 10 nucleotides which hybridises to a pretreated genomic DNA according to SEQ ID NO: 74 through 365 and SEQ ID NO 367 through 370. The oligomer probes according to the present invention constitute important and effective tools which, for the first time, make it possible to ascertain specific genetic and epigenetic parameters during the analysis of biological samples for features associated with the development of breast cell proliferative disorders. Said oligonucleotides allow the improved diagnosis, treatment and monitoring of breast cell proliferative disorders and detection of the predisposition to said disorders. Furthermore, they allow the differentiation of different subclasses of breast carcinomas. The base sequence of the oligomers preferably contains at least one CpG or TpG dinucleotide. The probes may also exist in the form of a PNA (peptide nucleic acid) which has particularly preferred pairing properties. Particularly preferred are oligonucleotides according to the present invention in which the cytosine of the CpG dinucleotide is within the middle third of said oligonucleotide e.g. the 5^{th}-9^{th} nucleotide from the 5′-end of a 13-mer oligonucleotide; or in the case of PNA-oligomers, it is preferred for the cytosine of the CpG dinucleotide to be the 4^{th}-6^{th} nucleotide from the 5′-end of the 9-mer.

[0054] The oligomers according to the present invention are normally used in so called “sets” which contain at least one oligomer for each of the CpG dinucleotides within SEQ ID NO: 74 through SEQ ID NO: 365 and SEQ ID NO 367 through 370.

[0055] In the case of the sets of oligonucleotides according to the present invention, it is preferred that at least one oligonucleotide is bound to a solid phase. It is further preferred that all the oligonucleotides of one set are bound to a solid phase.

[0056] The present invention further relates to a set of at least 10 n (oligonucleotides and/or PNA-oligomers) used for detecting the cytosine methylation state of genomic DNA, by analysis of said sequence or treated versions of said sequence (according to SEQ ID NO: 1 through SEQ ID NO: 366 and sequences complementary thereto). These probes enable improved diagnosis, treatment and monitoring of breast cell proliferative disorders. In particular they enable the differentiation between different sub classes of breast cell proliferative disorders and the detection of a predisposition to said disorders.

[0057] The set of oligomers may also be used for detecting single nucleotide polymorphisms (SNPs) by analysis of said sequence or treated versions of said sequence according to one of SEQ ID NO: 1 through SEQ ID NO: 370.

[0058] According to the present invention, it is preferred that an arrangement of different oligonucleotides and/or PNA-oligomers (a so-called “array”) made available by the present invention is present in a manner that it is likewise bound to a solid phase. This array of different oligonucleotide- and/or PNA-oligomer sequences can be characterised in that it is arranged on the solid phase in the form of a rectangular or hexagonal lattice. The solid phase surface is preferably composed of silicon, glass, polystyrene, aluminium, steel, iron, copper, nickel, silver, or gold. However, nitrocellulose as well as plastics such as nylon which can exist in the form of pellets or also as resin matrices are suitable alternatives.

[0059] Therefore, a further subject matter of the present invention is a method for manufacturing an array fixed to a carrier material for the improved diagnosis, treatment and monitoring of breast cell proliferative disorders, the differentiation between different subclasses of breast carcinomas and/or detection of the predisposition to breast cell proliferative disorders. In said method at least one oligomer according to the present invention is coupled to a solid phase. Methods for manufacturing such arrays are known, for example, from U.S. Pat. No. 5,744,305 by means of solid-phase chemistry and photolabile protecting groups.

[0060] A further subject matter of the present invention relates to a DNA chip for the improved diagnosis, treatment and monitoring of breast cell proliferative disorders. Furthermore the DNA chip enables detection of the predisposition to breast cell proliferative disorders and the differentiation between different subclasses of breast carcinomas. The DNA chip contains at least one nucleic acid according to the present invention. DNA chips are known, for example, in U.S. Pat. No. 5,837,832.

[0061] Moreover, a subject matter of the present invention is a kit which may be composed, for example, of a bisulfite-containing reagent, a set of primer oligonucleotides containing at least two oligonucleotides whose sequences in each case correspond to or are complementary to a 18 base long segment of the base sequences specified in the appendix (SEQ ID NO: 74 through SEQ ID NO: 365 and SEQ ID NO 367 through 370), oligonucleotides and/or PNA-oligomers as well as instructions for carrying out and evaluating the described method.

[0062] In a further preferred embodiment said kit may further comprise standard reagents for performing a CpG position specific methylation analysis wherein said analysis comprises one or more of the following techniques: MS-SNuPE, MSP, Methyl light, Heavy Methyl, and nucleic acid sequencing. However, a kit along the lines of the present invention can also contain only part of the aforementioned components.

[0063] The oligomers according to the present invention or arrays thereof as well as a kit according to the present invention are intended to be used for the improved diagnosis, treatment and monitoring of breast cell proliferative disorders. Furthermore the use of said inventions extends to the differentiation between different subclasses of breast carcinomas and detection of the predisposition to breast cell proliferative disorders. According to the present invention, the method is preferably used for the analysis of important genetic and/or epigenetic parameters within genomic DNA, in particular for use in improved diagnosis, treatment and monitoring of breast cell proliferative disorders, detection of the predisposition to said disorders and the differentiation between subclasses of said disorders.

[0064] The methods according to the present invention are used, for example, for improved diagnosis, treatment and monitoring of breast cell proliferative disorders progression, detection of the predisposition to said disorders and the differentiation between subclasses of said disorders.

[0065] The present invention moreover relates to the diagnosis and/or prognosis of events which are disadvantageous or relevant to patients or individuals in which important genetic and/or epigenetic parameters within genomic DNA, said parameters obtained by means of the present invention may be compared to another set of genetic and/or epigenetic parameters, the differences serving as the basis for the diagnosis and/or prognosis of events which are disadvantageous or relevant to patients or individuals.

[0066] The genes and/or the nucleic acids that form the basis of the present invention can be used to form a “gene panel”, i.e. a collection comprising the particular genetic sequences of the present invention and/or their respective informative methylation sites. The formation of gene panels allow for a quick and specific analysis of the disorders they are related with. The gene panel(s) as described and employed in this invention can be used with surprisingly high efficiency for the diagnosis, treatment and monitoring of and the analysis of a predisposition to the disorders described herein, based on the analysis of the methylation status of said panels.

[0067] The use of multiple and selective CpG sites from a diverse array of genes regulating breast cell proliferative disorders, in addition allows for a surprisingly high degree of sensitivity and specificity in comparison to single gene diagnostic and detection tools. Furthermore, as compared to many the panel as described herein may be adapted for use in the analysis of multiple diseases all affected by regulating breast cell proliferative disorders.

[0068] In the context of the present invention the term “hybridisation” is to be understood as a bond of an oligonucleotide to a completely complementary sequence along the lines of the Watson-Crick base pairings in the sample DNA, forming a duplex structure.

[0069] In the context of the present invention, “genetic parameters” are mutations and polymorphisms of genomic DNA and sequences further required for their regulation. To be designated as mutations are, in particular, insertions, deletions, point mutations, inversions and polymorphisms and, particularly preferred, SNPs (single nucleotide polymorphisms).

[0070] In the context of the present invention, “epigenetic parameters” are, in particular, cytosine methylations and further modifications of DNA bases of genomic DNA and sequences further required for their regulation. Further epigenetic parameters include, for example, the acetylation of histones which, cannot be directly analysed using the described method but which, in turn, correlates with the DNA methylation.

[0071] In the following, the present invention will be explained in greater detail on the basis of the sequences, the tables, and the examples without being limited thereto. SEQ ID NO: 1 through SEQ ID NO: 73 and SEQ ID NO: 366 represent 5′ and/or regulatory regions and/or CpG rich regions of the genes according to Table 1. These sequences are derived from Genbank and will be taken to include all minor variations of the sequence material which are currently unforeseen, for example, but not limited to, minor deletions and SNPs.

[0072] SEQ ID NO: 74 through SEQ ID NO: 365 and SEQ ID NO 367 through 370 exhibit the pretreated sequence of DNA derived from the genes according to Table 1. These sequences will be taken to include all minor variations of the sequence material which are currently unforeseen, for example, but not limited to, minor deletions and SNPs.

[0073] SEQ ID NO: 371 through SEQ ID NO: 396 exhibit the sequences of primers and other oligonucleotides used in the analysis of a selected panel of the genes of Table 1, as described in the embodiments of the method according to examples 1 to 4.

[0074] FIG. 1 shows the analysis of bisulphite-treated DNA using the MethylLight and Heavy Methyl assays, performed according to Examples 2 and 3 respectively. Results of the HeavyMethyl assay are shown on the left hand bar chart and results of the MethyLight assay are shown on the right hand bar chart. The Y-axis shows the percentage of methylation at the CpG positions covered by the probes. The dark black bar (“A” in the legend) corresponds to tumour samples, whereas the white bar (“B”) corresponds to normal control tissue. Significantly, the tumour samples are substantially hypermethylated relative to normal control tissue.

[0075] FIG. 2 shows the level of methylation in breast tumour and healthy tissues as assessed according to Example 3 by means of the Heavy Methyl assay. The Y-axis shows the degree of methylation within the region of the Calcitonin gene investigated. Tumour samples are represented by black diamonds, and normal breast tissue samples by white squares. As can be seen from the results, a significantly higher degree of methylation (hypermethylation) was observed in tumour samples relative to normal tissue samples.

[0076] TABLE 1
Description of genes comprising panel.

| | | | | Seq ID | Seq. ID No. |
|---|---|---|---|---|---|
| Accession | | | Seq. ID No. | No. Treated | Treated |
| No. | Gene name | Description | (Genomic) | (methylated) | (unmethylated) |
| NM_001846 | COL4A2 | collagen, type IV, | 1 | 74, 75 | 82, 83 |
| | | alpha 2 | | | |
| NM_004663 | GTPase | rab11a GTPase | 2 | 76, 77 | 84, 85 |
| NM_001218 | CA XII | carbonic anhydrase | 3 | 78, 79 | 86, 87 |
| | | XII precursor | | | |
| AF073519 | SERF1A | small EDRK-rich | 4 | 80, 81 | 88, 89 |
| | | factor 1A (telomeric) | | | |
| NM_006526 | ZNF217 | Zinc Finger Protein | 5 | 90, 91 | 96, 97 |
| | | 217 | | | |
| AJ293618 | JCL-1 | Human | 6 | 92, 93 | 98, 99 |
| | | hepatocellular | | | |
| | | carcinoma associated | | | |
| | | protein | | | |
| NM_007194 | CHK2 | SERINE/THREONINE- | 7 | 94, 95 | 100, 101 |
| | | PROTEIN | | | |
| | | KINASE CHK2 (EC | | | |
| | | 2.7.1.—)(CDS1). | | | |
| D14034 | zinc-alpha2- | | 8 | 102, 103 | 114, 115 |
| | glycoprotein | | | | |
| X03473 | Histone H1 | Human gene for | 9 | 104, 105 | 116, 117 |
| | | histone H1(0) | | | |
| NM_000127 | EXT1 | exostoses (multiple) 1 | 10 | 106, 107 | 118, 119 |
| NM_000436 | OXCT | 3-oxoacid CoA | 11 | 108, 109 | 120, 121 |
| | | transferase | | | |
| NM_000599 | IGFBP5 | insulin-like growth | 12 | 110, 111 | 122, 123 |
| | | factor binding | | | |
| | | protein 5 | | | |
| NM_000849 | GSTM3 | glutathione S- | 13 | 112, 113 | 124, 125 |
| | | transferase M3 | | | |
| | | (brain) | | | |
| NM_001282 | AP2B1 | adaptor-related | 14 | 126, 127 | 138, 139 |
| | | protein complex 2, | | | |
| | | beta 1 subunit | | | |
| NM_001809 | CENPA | centromere protein | 15 | 128, 129 | 140, 141 |
| | | A(17 kD) | | | |
| NM_002019 | FLT1 | fms-related tyrosine | 16 | 130, 131 | 142, 143 |
| | | kinase 1 (vascular | | | |
| | | endothelial growth | | | |
| | | factor/vascular | | | |
| | | permeability factor | | | |
| | | receptor) | | | |
| NM_002073 | GNAZ | guanine nucleotide | 17 | 132, 133 | 144, 145 |
| | | binding protein (G | | | |
| | | protein), alpha z | | | |
| | | polypeptide | | | |
| NM_002916 | RFC4 | replication factor C | 18 | 134, 135 | 146, 147 |
| | | (activator 1) 4 | | | |
| | | (37 kD) | | | |
| NM_003239 | TGFB3 | transforming growth | 19 | 136, 137 | 148, 149 |
| | | factor, beta 3 | | | |
| NM_003607 | PK428 | Ser-Thr protein | 20 | 150, 151 | 162, 163 |
| | | kinase related to the | | | |
| | | myotonic dystrophy | | | |
| | | protein kinase | | | |
| NM_003748 | ALDH4 | aldehyde | 21 | 152, 153 | 164, 165 |
| | | dehydrogenase 4 | | | |
| | | (glutamate gamma- | | | |
| | | semialdehyde | | | |
| | | dehydrogenase | | | |
| NM_003875 | GMPS | guanine | 22 | 154, 155 | 166, 167 |
| | | monphosphate | | | |
| | | synthetase | | | |
| NM_003882 | WISP1 | WNT1 inducible | 23 | 156, 157 | 168, 169 |
| | | signaling pathway | | | |
| | | protein 1 | | | |
| NM_003981 | PRC1 | protein regulator of | 24 | 158, 159 | 170, 171 |
| | | cytokinesis 1 | | | |
| NM_004702 | CCNE2 | G1/S-Specific | 25 | 160, 161 | 172, 173 |
| | | Cyclin E2. | | | |
| NM_004994 | MMP9 | matrix | 26 | 174, 175 | 184, 185 |
| | | metalloproteinase 9 | | | |
| | | (gelatinase B, 92 kD | | | |
| | | gelatinase, 92 kD | | | |
| | | type IV collagenase) | | | |
| NM_005915 | MCM6 | minichromosome | 27 | 176, 177 | 186, 187 |
| | | maintenance | | | |
| | | deficient (mis5, S. pombe)6 | | | |
| NM_006101 | HEC | highly expressed in | 28 | 178, 179 | 188, 189 |
| | | cancer, rich in | | | |
| | | leucine heptad | | | |
| | | repeats | | | |
| NM_006117 | PECI | peroxisomal D3, D2-. | 29 | 180, 181 | 190, 191 |
| | | enoyl-CoA | | | |
| | | isomerase | | | |
| NM_006681 | NMU | neuromedin U | 30 | 182, 183 | 192, 193 |
| NM_006931 | SLC2A3 | solute carrier family | 31 | 194, 195 | 204, 205 |
| | | 2 (facilitated glucose | | | |
| | | transporter), member 3 | | | |
| NM_007036 | ESM1 | endothelial cell- | 32 | 196, 197 | 206, 207 |
| | | specific molecule 1 | | | |
| NM_007203 | AKAP2 | A kinase (PRKA) | 33 | 198, 199 | 208, 209 |
| | | anchor protein 2 | | | |
| NM_020188 | DC13 | DC13 protein | 34 | 200, 201 | 210, 211 |
| NM_015984 | UCH37 | ubiquitin C-terminal | 35 | 202, 203 | 212, 213 |
| | | hydrolase UCH37 | | | |
| NM_014321 | ORC6L | origin recognition | 36 | 214, 215 | 218, 219 |
| | | complex, subunit 6 | | | |
| | | (yeast homolog)-like | | | |
| NM_016448 | L2DTL | L2DTL protein | 37 | 216, 217 | 220, 221 |
| NM_000038 | APC | adenomatosis | 38 | 222, 223 | 240, 241 |
| | | polyposis coli | | | |
| NM_006768 | BRCA1 | breast cancer 1, early | 39 | 224, 225 | 242, 243 |
| | | onset | | | |
| NM_001759 | CCND2 | cyclin D2 | 40 | 226, 227 | 244, 245 |
| NM_004360 | CDH1 | cadherin 1, type 1, | 41 | 228, 229 | 246, 247 |
| | | E-cadherin | | | |
| NM_001257 | CDH13 | H-cadherin | 42 | 230, 231 | 248, 249 |
| NM_058195, | CDKN2A | cyclin-dependent | 43 | 232, 233 | 250, 251 |
| NM_058196, | | kinase inhibitor 2A | | | |
| NM_000077 | | | | | |
| NM_000125 | ESR1 | estrogen receptor 1 | 44 | 234, 235 | 252, 253 |
| NM_004102 | FABP3 | fatty acid binding | 45 | 236, 237 | 254, 255 |
| | | protein 3 | | | |
| NM_002012 | FHIT | fragile histidine triad | 46 | 238, 239 | 256, 257 |
| | | gene | | | |
| NM_004004 | GJB2 | gap junction protein, | 47 | 258, 259 | 276, 277 |
| | | beta 2 | | | |
| NM_000852 | GSTP1 | Glutathione S- | 48 | 260, 261 | 278, 279 |
| | | transferase pi | | | |
| NM_006497 | HIC-1 | hypermethylated in | 49 | 262, 263 | 280, 281 |
| | | cancer 1 | | | |
| NM_002478 | MYOD1 | myogenic factor 3 | 50 | 264, 265 | 282, 283 |
| NM_007182 | RASSF1 | Ras association | 51 | 266, 267 | 284, 285 |
| | | (RalGDS/AF-6) | | | |
| | | domain family 1 | | | |
| NM_133631, | ROBO1 | roundabout, axon | 52 | 268, 269 | 286, 287 |
| NM_002941 | | guidance receptor, | | | |
| | | homolog 1 | | | |
| NM_006142 | SFN | stratifin | 53 | 270, 271 | 288, 289 |
| NM_013258 | TMS1 | target of | 54 | 272, 273 | 290, 291 |
| | | methylation-induced | | | |
| | | silencing gene | | | |
| NM_004906 | WT1 | Wilms tumor 1 | 55 | 274, 275 | 292, 293 |
| NM_016359 | LOC51203 | clone HQ0310 | 56 | 294, 295 | 310, 311 |
| | | PRO0310p1 | | | |
| NM_014791 | KIAA0175 | KIAA0175 gene | 57 and 58 | 296-299 | 312-315 |
| | | product | | | |
| NM_016577 | RAB6B | RAB6B, member | 59 | 300, 301 | 316, 317 |
| | | RAS oncogene | | | |
| | | family | | | |
| NM_000788 | DCK | deoxycytidine kinase | 60 | 302, 303 | 318, 319 |
| NM_014889 | MP1 | metalloprotease 1 | 61 | 304, 305 | 320, 321 |
| | | (pitrilysin family) | | | |
| NM_000599 | IGFBP5 | insulin-like growth | 62 | 306, 307 | 322, 323 |
| | | factor binding | | | |
| | | protein 5 | | | |
| NM_020386 | LOC57110 | H-REV107 protein- | 63 | 308, 309 | 324, 325 |
| | | related protein | | | |
| NM_018401 | HSA250839 | gene for | 64 | 326, 327 | 340, 341 |
| | | serine/threonine | | | |
| | | protein kinase | | | |
| BC001653 | MG2771 | hypothetical protein | 65 | 328, 329 | 342, 343 |
| | | MG2771 | | | |
| X51754 | IG | Lambda- | 66 | 330, 331 | 344, 345 |
| | LAMBDA | immunoglobulin | | | |
| | CHAIN C | light chain. | | | |
| | REGIONS | | | | |
| U82987 | BBC3 | Bcl-2 binding | 67 | 332, 333 | 346, 347 |
| | | component 3 | | | |
| X60111 | HMRP-1 | H. sapiens MRP-1 | 68 | 334, 335 | 348, 349 |
| AB021868 | STAT3 | signal transducer and | 69 | 336, 337 | 350, 351 |
| | | activator of | | | |
| | | transcription 3 | | | |
| X55543 | TREB | tax-responsive | 70 | 338, 339 | 352, 353 |
| | | element-binding | | | |
| | | protein | | | |
| NM_005978 | s100a2 | calcium-binding | 71 | 354, 355 | 360, 361 |
| | | protein S100A2 | | | |
| NM_002658 | UPA | Urokinase | 72 | 356, 357 | 362, 363 |
| NM_000926 | PGR | progesterone | 73 | 358, 359 | 364, 365 |
| | | receptor | | | |
| X15943 | Calcitonin | Calcitonin | 366 | 367, 368 | 370, 369 |

### EXAMPLES

[0077] In order to establish the suitability of genes for inclusion within the panel each gene was investigated by means of both relatively unspecific and highly sensitive methods. Methylation within the Calcitonin gene was analysed using three different methods, namely restriction enzyme, MethyLight and combined HeavyMethyl MethyLight assays.

### Example 1

### Restriction Enzyme Analysis

[0078] The differential methylation was initially observed by means of methylation sensitive restriction enzyme analysis. A fragment of the upstream region of the calcitonin gene (SEQ ID NO:366) was amplified by PCR using the primers CCTTAGTCCCTACCTCTGCT (SEQ ID NO:371) and CTCATTTACACACACCCAAAC (SEQ ID NO:372). The resultant amplificate, 378 bp in length, contained an informative CpG at position 165. The amplificate DNA was digested with the methylation sensitive restriction endonuclease Nar I; recognition motif GGCGCC. Hydrolysis by said endonuclease is blocked by methylation of the CpG at position 165 of the amplificate. The digest was used as a control.

[0079] Genomic DNA was isolated from the breast tissue and breast tumour samples using the DNA wizzard™ DNA isolation kit (Promega). Each sample was digested using Nar I according to manufacturer's recommendations (New England Biolabs).

[0080] About 10 ng of each genomic digest was then amplified using PCR primers CCTTAGTCCCTACCTCTGCT (SEQ ID NO: 371) and CTCATTTACACACACCCAAAC (SEQ ID NO: 372). The PCR reactions were performed using a thermocycler (Eppendorf GmbH) using 10 ng of DNA, 6 pmole of each primer, 200 μM of each DNTP, 1.5 mM MgCl₂ and 1 U of Hotstart™Taq (Qiagen AG). The other conditions were as recommended by the Taq polymerase manufacturer.

[0081] Using the above mentioned primers, gene fragments were amplified by PCR performing a first denaturation step for 14 min at 96° C., followed by 30-45 cycles (step 2: 60 sec at 96° C., step 3: 45 sec at 52° C., step 4: 75 sec at 72° C.) and a subsequent final elongation of 10 min at 72° C. The presence of PCR products was analysed by agarose gel electrophoresis.

[0082] PCR products were detectable, with Nar 1-hydrolysed DNA isolated wherein the tissue in question contained upmethylated DNA, when step 2 to step 4 of the cycle program were repeated 34, 37, 39, 42 and 45 fold. In contrast, PCR products were only detectable with Nar I-hydrolyzed DNA isolated from downmethylated tissue when steps 2 to step 4 of the cycle program were repeated 42- and 45-fold. Further investigation of the Calcitonin gene was then carried out by means of highly sensitive assays as described in Example 2 and 3.

### Example 2

### Analysis of Methylation within Breast Cancer Using a MethyLight Assay

[0083] DNA was extracted from 21 breast carcinoma samples and 17 normal breast tissues using a Qiagen extraction kit. The DNA from each sample was treated using a bisulfite solution (hydrogen sulfite, disulfite) according to the agarose-bead method (Olek et al 1996). The treatment is such that all non methylated cytosines within the sample are converted to thymidine. Conversely, 5-methylated cytosines within the sample remain unmodified.

[0084] The methylation status was determined with a MethyLight assay designed for the CpG island of interest and a control fragment from the beta actin gene (Eads et al., 2001). The CpG island assay covers CpG sites in both the primers and the taqman style probe, while the control gene does not. The control gene is used as a measure of total DNA concentration, and the CpG island assay (methylation assay) determines the methylation levels at that site.

[0085] Methods. The Calcitonin gene CpG island assay was performed using the following primers and probes:

| | |
|---|---|
| Primer: | |
| AGGTTATCGTCGTGCGAGTGT; | (SEQ ID NO:373) |
| Primer: | |
| TCACTCAAACGTATCCCAAACCTA; | (SEQ ID NO:374) |
| and | |
| Probe: | |
| CGAATCTCTCGAACGATCGCATCCA. | (SEQ ID NO:375) |

[0086] The corresponding control assay was performed using the following primers and probes

| | |
|---|---|
| Primer: | |
| TGGTGATGGAGGAGGTTTAGTAAGT; | (SEQ ID NO:376) |
| Primer: | |
| AACCAATAAAACCTACTCCTCCCTTAA; | (SEQ ID NO:377) |
| and | |
| Probe: | |
| ACCACCACCCAACACACAATAACAAACACA. | (SEQ ID NO:378) |

[0087] The reactions were run in triplicate on each DNA sample with the following assay conditions:

[0088] Reaction solution: (900 nM primers; 300 nM probe; 3.5 mM Magnesium Chloride; 1 unit of taq polymerase; 200 mM dNTPs; 7 ml of DNA, in a final reaction volume of 20 ml);

[0089] Cycling conditions: (95° C. for 10 minutes; 95° C. for 15 seconds; 67° C. for 1 minute (3 cycles)); (95° C. for 15 seconds, 64° C. for 1 minute (3 cycles)); (95° C. for 15 seconds, 62° C. for 1 minute (3 cycles)); and (95° C. for 15 seconds, 60° C. for 1 minute (40 cycles)). The data was analysed using a PMR calculation previously described in the literature (Eads et al 2001).

[0090] Results. The mean PMR for normal samples was 0.94, with a standard deviation of 1.28. The mean PMR for tumour samples was 8.38, with a standard deviation of 11.18. The overall difference in methylation levels between tumour and normal samples is significant in a t-test (p=0.0065).

### Experiment 3

### Single Gene Analysis

[0091] The same samples were analysed using the HeavyMethyl MethyLight (or HM MethyLight) assay, also referred to as the HeavyMethyl assay. The methylation status was determined with a HM MethyLight assay designed for the CpG island of interest and a control gene assay. The CpG island assay covers CpG sites in both the blockers and the taqman style probe, while the control gene does not.

[0092] Methods. The CpG island assay (methylation assay) was performed using the following primers and probes:

| | |
|---|---|
| Primer: | |
| GGATGTGAGAGTTGTTGAGGTTA; | (SEQ ID NO: 379) |
| Primer: | |
| ACACACCCAAACCCATTACTATCT; | (SEQ ID NO: 380) |
| Probe: | |
| ACCTCCGAATCTCTCGAACGATCGC; | (SEQ ID NO: 381) |
| and | |
| Blocker: | |
| TGTTGAGGTTATGTGTAATTGGGTGTGA. | (SEQ ID NO: 382) |

[0093] The reactions were each run in triplicate on each DNA sample with the following assay conditions:

[0094] Reaction solution: (300 nM primers; 450 nM probe; 3.5 mM magnesium chloride; 2 units of taq polymerase; 400 mM dNTPs; and 7 ml of DNA, in a final reaction volume of 20 ml);

[0095] Cycling conditions: (95° C. for 10 minutes); (95° C. for 15 seconds, 67° C. for 1 minute (3 cycles)); (95° C. for 15 seconds, 64° C. for 1 minute (3 cycles); (95° C. for 15 seconds, 62° C. for 1 minute (3 cycles)); and (95° C. for 15 seconds, 60° C. for 1 minute (40 cycles)).

[0096] Results. The mean PMR for normal samples was 0.58, with a standard deviation of 0.94. The mean PMR for tumour samples was 3.01, with a standard deviation of 3.91. The overall difference in methylation levels between tumor and normal samples is significant in a t-test (p=0.0012).

[0097] Taking into account the significance of the analyses it was decided to combine the identified CpG island with other informative CpG rich regions in the form of a gene panel for use as a diagnostic assay. This would increase the level of specificity and sensitivity as opposed to use of the identified CpG rich region as a single gene marker type diagnostic assay.

### Example 4

### Multiple Gene ‘Panel’ Analysis

[0098] The informative region as disclosed in SEQ ID No. 366 was included in a panel of genes for the assessment of breast tumours samples. Accordingly, an assay was devised suitable for the medium throughput analysis of mutliple CpG positions in multiple samples, the chosen format being microarray analysis.

[0099] All samples were treated using the bisulphite technique disclosed in ‘Example 1’. Following bisulphite treatment selected CpG rich regions from the genes according to Table 2 were amplified by means of multiplex polymerase chain reaction, amplifying 8 fragments per reaction with Cy5 fluorescently labelled primers according to Table 2. The following conditions were used:

10 ng bisulfite treated DNA

3.5 mM MgCl₂

400 μM dNTPs

2 pmol each primer

1 U Hot Start Taq (Qiagen)

[0100] Forty cycles were carried out as follows. Denaturation at 95° C. for 15 min, followed by annealing at 55° C. for 45 sec., primer elongation at 65° C. for 2 min. A final elongation at 65° C. was carried out for 10 min.

[0101] All PCR products from each individual sample were then hybridised to glass slides carrying a pair of immobilised oligonucleotides for each CpG position under analysis. Each of these detection oligonucleotides was designed to hybridise to the bisulphite converted sequence around one CpG site which was either originally unmethylated (TG) or methylated (CG). Hybridisation conditions were selected to allow the detection of the single nucleotide differences between the TG and CG variants.

[0102] 5 μl volume of each multiplex PCR product was diluted in 10×Ssarc buffer (10×Ssarc:230 ml 20×SSC, 180 ml sodium lauroyl sarcosinate solution 20%, dilute to 1000 ml with dH₂O). The reaction mixture was then hybridised to the detection oligonucleotides as follows. Denaturation at 95° C., cooling down to 10° C., hybridisation at 42° C. overnight followed by washing with 10×Ssarc and dH₂O at 42° C.

[0103] Fluorescent signals from each hybridised oligonucleotide were detected using genepix scanner and software. Ratios for the two signals (from the CG oligonucleotide and the TG oligonucleotide used to analyse each CpG position) were calculated based on comparison of intensity of the fluorescent signals.

[0104] The information is then sorted into a ranked matrix according to CpG methylation differences between the two classes of tissues, using an algorithm. In order to accurately discriminate between the two classes of tissues, we trained a learning algorithm (support vector machine, SVM). The SVM was discussed by F. Model, P. Adorjan, A. Olek, C. Piepenbrock, Feature selection for DNA methylation based cancer classification. Bioinformatics. 2001 June;17 Suppl 1:S157-64. The algorithm constructs an optimal discriminant between two classes of given training samples. In this case each sample is described by the methylation patterns (CG/TG ratios) at the investigated CpG sites. The SVM was trained on a subset of samples of each class, which were presented with the diagnosis attached. Independent test samples, which were not shown to the SVM before were then presented to evaluate, to establish if the diagnosis could be predicted correctly based on the predictor created in the training round. This procedure was repeated several times using different partitions of the samples, a method called cross-validation. Please note that all rounds are performed without using any knowledge obtained in the previous runs. The number of correct classifications was averaged over all runs, which gives a good estimate of our test accuracy (percent of correct classified samples over all rounds).

TABLE 2
Genes and Primers according to Example 4

| | |
|---|---|
| Gene | Primers |

| | |
|---|---|
| CDKN2A | TTGAAAATTAAGGGTTGAGG |
| SEQ ID NO 43 | (SEQ ID NO: 383) |
| | CACCCTCTAATAACCAACCA |
| | (SEQ ID NO: 384) |
| CDKN2A | GGGGTTGGTTGGTTATTAGA |
| SEQ ID NO 43 | (SEQ ID NO: 385) |
| | AACCCTCTACCCACCTAAAT |
| | (SEQ ID NO: 386) |
| RASSF1 | ACCTCTCTACAAATTACAAATTCA |
| SEQ ID NO 51 | (SEQ ID NO: 387) |
| | AGTTTGGGTTAGTTTGGGTT |
| | (SEQ ID NO: 388) |
| MYOD1 | ATTAGGGGTATAGAGGAGTATTGA |
| SEQ ID NO 50 | (SEQ ID NO: 389) |
| | CTTACAAACCCACAATAAACAA |
| | (SEQ ID NO: 390) |
| WT1 | AAAGGGAAATTAAGTGTTGT |
| SEQ ID NO 55 | (SEQ ID NO: 391) |
| | TAACTACCCTCAACTTCCC |
| | (SEQ ID NO: 392) |
| BRCA1 | TGGATGGGAATTGTAGTTTT |
| SEQ ID NO 39 | (SEQ ID NO: 393) |
| | TTAACCACCCAATCTACCC |
| | (SEQ ID NO: 394) |
| CCND2 | TTTTGGTATGTAGGTTGGATG |
| SEQ ID NO 40 | (SEQ ID NO: 395) |
| | CCTAACCTCCTTCCTTTAACT |
| | (SEQ ID NO: 396) |
| Calcitonin | AGGTTATCGTCGTGCGAGTGT |
| SEQ ID NO: 366 | (SEQ ID NO: 373) |
| | TCACTCAAACGTATCCCAAACCTA |
| | (SEQ ID NO: 374) |

1. A method for the analysis of breast cell proliferative disorders, comprising determining the genomic methylation status of at least one CpG dinucleotide of at least one sequence selected from the sequence group consisting of SEQ ID NOS:1-73, SEQ ID NO:366, contiguous portions thereof, and sequences complementary thereto.

2. The method of claim 1, wherein determining the genomic methylation status of the at least one CpG dinucleotide, comprises: obtaining a biological sample comprising genomic DNA from a subject; and contacting the genomic DNA with at least one reagents or a series of reagent, which distinguishes between methylated and non-methylated CpG dinucleotides.

3. A nucleic acid molecule consisting essentially of a sequence at least 18 contiguous bases in length of a sequence selected from the sequence group consisting of SEQ ID NOS:74-365, and SEQ ID NOS:367-370, and sequences complementary thereto.

4. An oligomer, consisting essentially of a sequence of at least 10 contiguous nucleotides in length that hybridises to or is identical to a sequence selected from the group consisting of SEQ ID NOS:1-370.

5. The oligomer of claim 4, wherein the contiguous base sequence includes at least one CpG dinucleotide.

6. The oligomer of claim 5, wherein the cytosine of the CpG dinucleotide is located in about the middle third of the oligomer.

7. A set of oligomers, comprising at least two oligomers according to any of claims 4 to 6.

8. The set of oligomers of claim 7, comprising oligomers for detecting the methylation state of all CpG dinucleotides within sequences of the sequence group consisting of SEQ ID NOS: 1-73 SEQ ID NO: 366, contiguous portions thereof, and sequences complementary thereto.

9. The set of oligomers of claim 7, wherein the set is suitable for use as primer oligonucleotides for the amplification of a sequence selected from the sequence group consisting of SEQ ID NOS: 1-370, contiguous portions thereof, and sequences complementary thereto.

10. The set of oligomers according to any one of claims 7 through 9, wherein at least one oligomer is bound to a solid phase.

11. A method for determining methylation state or for detecting single nucleotide polymorphisms, comprising using a set of oligonucleotides comprising at least three oligomers according to any of claims 4 through 10 in an assay suitable for at least one of detecting cytosine methylation state single nucleotide polymorphisms (SNPs), within a sequence selected from the group consisting of SEQ ID NOS: 1-370, contiguous portions thereof, and sequences complementary thereto.

12. A method for manufacturing an arrangement of different oligomers (array) fixed to a carrier material and suitable for analysing breast cell proliferative disorders associated with the methylation state of of at least one CpG dinucleotide of a sequence selected from the group consisting of SEQ ID NOS:1-73 and SEQ ID NO:366, contiguous portions thereof, and sequences complementary thereto, comprising coupling at least one nucleic acid or oligomer according to any of the claims 3 through 10 to a solid phase.

13. An arrangement of different oligomers (array) obtainable according to claim 12.

14. The arrangement of claim 13 wherein the oligomers are at least one of oligonucleotides and PNA-oligomer sequences, wherein the carrier material is a planar solid phase, and wherein the oligomers are arranged thereon in the form of a rectangular or hexagonal lattice.

15. The arrangement of claim 13, wherein the carrier material comprises a material selected from the group consisting of silicon, glass, polystyrene, aluminium, steel, iron, copper, nickel, silver, gold, and combinations thereof.

16. An oligomer array suitable for analysing breast cell proliferative disorders associated with the methylation state of at least one CpG dinucleotide of a sequence selected from the group consisting of SEQ ID NOS:1-73, SEQ ID NO:366, contiguous portions thereof, and sequences complementary thereto, the array comprising at least one nucleic acid or oligomer according to any one of claims 3 through 10.

17. A method for the analysis of breast cell proliferative disorders, comprising:
a) obtaining a biological sample comprising genomic DNA:
b) contacting the genomic DNA, or a portion thereof with an agent or combination of agents suitable to convert cytosine bases that are unmethylated at the 5-position to uracil or to another base which is dissimilar to cytosine in terms of hybridisation behaviour, to provide a pretreated DNA;
c) amplifying, using at least one set of primer oligonucleotides and a polymerase, at least one pretreated DNA sequence, or a portion thereof, selected from the sequence group consisting of SEQ ID NOS:74-365, SEB ID NOS:367-370, contiguous portions thereof, and sequences complementary thereto;
d) determining, based on the amplification, or on analysis of the nucleic acid amplificate, the methylation status of one or more genomic CpG dinucleotides, whereby analysis of breast cell proliferative disorders is, at least in part, afforded.

18. The method of claim 17, wherein determining in d) comprises hybridisation of at least one nucleic acid or oligomer according to any one of claims 3 through 10.

19. The method of claim 17, wherein determining in d) comprises hybridisation of at least one oligonucleotide according to any one of claims 3 through 10, and extension of the at least one hybridised oligonucleotide by at least one nucleotide base.

20. The method of claim 17, wherein determining in d) comprises sequencing.

21. The method of claim 17, wherein amplifying in c) comprises using methylation-specific primers.

22. The method of claim 17, wherein determining in d) comprises use of a combination of at least two of the methods described in any one of claims 18 through 21.

23. The method of claim 17, wherein contacting in c) comprises contacting with at least one agent selected from the group consisting of bisulfite, hydrogen sulfite or disulfite.

24. A method for the analysis of breast cell proliferative disorders, comprising:
a) obtaining, from a subject, a biological sample containing genomic DNA;
b) isolating the genomic DNA;
c) digesting the isolated genomic DNA, or a portion thereof comprising at least one sequence selected from the sequence group consisting of SEQ ID NOS1-73, SEQ ID NO:366, contiguous portions thereof, and sequences complementary thereto, with one or more methylation-sensitive methylation sensitive restriction enzymes; and
d) detecting of the DNA fragments generated in c), whereby analysis of breast cell proliferative disorders is, at least in part, afforded.

25. The method of according to claim 24, further comprising, prior to d), amplifying the DNA digest.

26. The method of any one of claims 17 and 25, wherein more than ten different fragments having a length of about 100 to about 200 base pairs are amplified.

27. The method of any one of claims 17 and 26, wherein the amplification of several DNA segments is carried out in one reaction vessel.

28. The method of any one of claims 17 and 25, wherein amplifying is by means of a heat-resistant DNA polymerase.

29. The method of any one of claims 17 and 25, wherein amplifying is by means of a polymerase chain reaction (PCR).

30. The method of any one of claims 17 and 25, wherein the amplificates carry detectable labels.

31. The method of claim 30, wherein said labels are selected from the group consisting of fluorescence labels, radionuclides, detachable molecule fragments having a typical mass which can be detected in a mass spectrometer and combinations thereof.

32. The method of claim 17, wherein amplificates or fragments of the amplificates are detected in the mass spectrometer.

33. The method of any one of claims 31 and 32, wherein produced fragments have a single positive or negative net charge for better detectability in the mass spectrometer.

34. The method of claim 30, wherein detection is carried out and visualised by means of at least one of matrix assisted laser desorption/ionisation mass spectrometry (MALDI), and using electron spray mass spectrometry (ESI).

35. The method of any one of the claims 17 and 24, wherein the genomic DNA is obtained from cells or cellular components which contain DNA, sources of DNA comprising, for example, cell lines, histological slides, biopsies, tissue embedded in paraffin and all possible combinations thereof.

36. A kit reagent having at least one of bisulfite, disulfite, and hydrogen sulfite, as well as at least one of oligonucleotides, and PNA-oligomers according to any one of the claims 4 through 10.

37. The kit of claim 36, further comprising standard reagents for performing a methylation assay selected from the group consisting of MS-SNuPE, MSP, MethyLight, HeavyMethyl, nucleic acid sequencing, and combinations thereof.

38. (canceled)

39. (canceled)

40. The oligomer of claim 4, wherein the oligomer is an oligonucleotide or a peptide nucleic acid (PNA)-oligomer.

The application's sequence listing, which the Patent Office published only in electronic form, follows.

SEQUENCE LISTING (396 sequences)

SEQ ID NO: 1 - DNA, 3001 bp, Homo Sapiens
gcactagctcacctgtgtgtgtgggggagggctgcactagctcacctgtgtgtgtgggggagggctgcactagctcacctgtgtgtgtgggggagggctgtactagctcacctgtgtggggggagggcagtaccagctcacctgtgtgtgtgggggagggctgcactagctcacctgtgtgtgtgggggagggctgcagtagctcacctgtgtgtgggggtggagggctgtacagctcacctgtgtgagtggggagggctgcactagctcacctgtgtgtgtgggggagggctgcactagctcacctgtgtgtgggggtggagggctgtacagctcacctgtgtgagtggggagggctgcactagctcacctgtgtgtgggggggagggctgtactagctcacctgtgtgggggctgagggctgcactaggtcacctgtatagggcggagggcagcactggctcacctgtggaatgaaggttgtactagcttacctgtcaggggagaggaggcctgcgctgagactcggctgatcagaaaggggagaaaagagggtcactctgattgccatcatctcaaaacgtttaatactgtcacgatttgaaaggaagagctaaggtacttgtccagtagcccaatctccaagtccatctttgatctgaatgttgagatcaaggatgagaaacacctttttgccccatcgggattgcccatccagggaactccctccatttcccactgactcacttaaggttgtatctccttctctgatgaaacactcaatggggtcacccacttgcctgaataggtcctgaggaaagcctcttcccggcattcctcctccttactgagcataagtgtgtcccgtagggcgaaggggaaagaaagtggacttcctctgccgacacccctcaaatgaagtcgcaagtgatatcggtggtgcagatgagggtttggcatcccgccagatgcacctgccagtccctcctcctcacatggccctccctttgatcaccatgatgggtgtcccatgagggagccaccgtttgcaccgacacctcctcctcccctccgtggtggcccactcctgcccacctctctgggttccccgccagcattttctccaggcacatgctccacatgtccaggcagaaggcagggctgctgcccatgccccggagtttctcatgcatgccacaggcctgctccttcctgattcctcacttcacatggaatccagattctcggaatgttctcctgacgctgaaggtccaggactttgcttggcatcgggcagtttataggcacttttttttttttttttgagacagtcttactctgtggcccaggctggagtgcagtggtgtgatctcagctcactgcaacctccacctcccggttcaagcgattttcctgcctcagcctcctaagtagctgggaataccggtgcctgccaccacgcctggctaatttttgtatttttagtagagacggggtttcaccatgttggccaggatggtcttgatctcctgaccttgtgatccacccgcctcggcctcccaaagtgctgggattccaggcgtgagcgaccgcgcccagcctagtgagaactatttaaagactccttgaccatagaacatacagcaccaagggtgaaccctggtctcaactgtggactctggtgatggtgatgcgggcagactcagcgattgtaaccagcatacaggttggttccaacctgtacatcctggtgcaggatgtcgatggtgggggatttcaggggtgggagagacaggggtatattggaaatctctggaccttacactcgattttgctgtgcaccaaaaactgctctaaaaattagtctatttttttaaaaaagccttattgaatgttttgaatgaatcgtttctagagttggaaggattctcaacagatgatattttaatacatgttgtagttggcaatgtttaggtaacttttctttgccttgtgttttattgttgcagggtgtgaagaagtttgatgtgccgtgtggaggaagagattgcagtgggggctgccagtgctaccctgagaaaggtggacgtgtaagtcacagcattgcaataaataatattatcttcctcatacagtcatgcctcgcttaacaacggggtaccttctgggacacgtgtggctgggcagtttcatcattgcttgaacatactggagagtactcacacaaacctagatggccgggcctactacacacccggctgtgtgataaagcctgttgctactaggctacaaacctgtacgtaggcagttgcgacacagtactatttgtatatctaaatacagaaaaggtacagtaaaaagaaagtaaaaagatgtaaaatgggactcctgtgtagggcatttaccatgaacggagcttgcgggacttggaagttgctctgtctgcgttggggagtgcggggtgcgtggatgtgaaggcctggggcgtgaccgcgcaccactgtagatccatcaacactgggtcttaggcggccctaaacttacgttttcaatatttttctttcttcagtaataaattaaccttagtttactataacttttttactttataaactgttaaactttttaaactttttgactgtttttgcaataacacttagcttaaaacacacattgtacagctgtacaaacatattttctttttctacgtttttattcgatgtttttttctattaaaaaaatttttttttactttttaaacttttttgttaaaaacaaagaaacaaacagacatgggagcctgggcctacacgggctcaggataatcaatatcactgtctttcacctccacatcttgtcccaccagaaggtcttcggggcaataacacgcatggagccgtcatcccctctgggaacaatgcctgcttctggattcttcctgaagcacctgcctgaggctattttacagttaacatatgtacacatataaataggagtacac

SEQ ID NO: 2 - DNA, 2501 bp, Homo Sapiens
gtatttgttttctattgcttctataacaaattaccacaaacttggtgacataaaacaacacaaatttattgcttaaagttctgtaggtcacaggtctgacaagtgtctcattgggctaaaatcaagttgtcagcagggctgtgttccttctgggggccttatggaagaatctgtttccatgcctttcccagcttctagaagcctccagattcctaggctcctgggccctttcctccatcttcaaagccagcaagggcagattgaggtcttttcaagtcacatcactctgacctcttctgcctccattttccacttttttttttttttttttgagaacgagtctctctctgttgcccaggctggagtgcagtggcgtggtatcagctcactgcaacctccgcttcccgggttccagcaattctcatgcctaagcctccagagtagctgggactacaggcacccaccaccacgccagactaattttttgtattttagtagcgacagggtttcaccttgttggccaggctggtcttgaactcttgacctcaggtgatccacccaccttggcctcccaaagtgctggaattaaggcctgagccaccgtgcccagcccattttctacttttaaggaccttatgacaacactgggcccacccaactaatccaggataatatccctaatttaatgtcagctgataagcaaccttaatttcatctgtaacctcaattcccctttgccatgtaacctaacctattcagtctccaggaattgggaagtggacatcattggcagggggcattattctgcttgttataggcatacttgcccacaagtctaaatcgagagtttgcatataggaggtaggaggtgtgacaataattggataaaggcttttctggaatgacaaaattctcttcaaatacagggaggccctgcgacatgatatctggcaaatcacttgagtcttagtatccaaacttccgctaaaatggaaattaccatcctttgcttggcatgttaaatgaaatacttatgtaaacggacttagattagaggcctacaaataggactcaagttcttgatgaatcttgatgaggagggtgggcgaagtactctaaatgaaaatgagatagattgcgagatttccggagaggagtgagtgacaagcgcctacccgtgcatgaagctggaggtagaaaattccagcaaaaggaattttcaagtttcactgaagcttttgaatcaaggcttgaaagcccagggttaaaaaaaaggcagtgaagaagctcattaagacaaccccccgccaggtagcagatagcacctgaaatgcagtgggaaatttgtgaggtcttcataggcaaggattaaattttacatctccatcttaagatgtgtcatagttgttcaattacttagtgaccaaaaaagtgaattaaagatgttgtcaagattaaaaaaacaaaaaccaatgcaggttccaccgagatttgaactcggatcgctggattcagagtccagagtgctaaccattacaccatggaaccgccacgcatgtgtagctgccttcggctgtctaatcctcagagaaccccgcccccatccacaaacccaccactcacaggcggtcccgcctggttccagcgagccgcttccggcacggtagctcgagaaatgagcaagcggccactaagactatggtagctaggagttccaggactcagtttcccctttgagcctcctttagcgactaaagcttgaagccccacgcatctcgactctcgcgcacaccgcccttgttgggctcaggggcggggcgccgcccccggaagtacttccccttaaaggctggggcctgccggaaatggcgcagcggcagggaggggctcttcacccagtccggcagttgaagctcggcgctcgggttacccctgcagcgacgccccctggtcccacagataccactgctgctcccgccctttcgctcctcggccgcgcaatgggcacccgcgacgacgagtacgactacctctttaaaggtgaggccatgggctctcgcactctacacagtcctcgttcggggacccgggccactcccggtggaccctcgtgccggccacccctgcactgatataggcctccctcagcccttcctttttgtgcggttccgtctcctacccagctcagcctcttctcccccgctcagacaggggtccccatcacatgccgctctctgagcgacctctccataggccttcgctggcctcagagcccctccctgcgtgtccttcccctggcggactgccttctcccacatcgtcgaattcctttccccgggttctacggccccgccgctcctcccaccatctctcttttcgggtgtagcgccccctccccctcggcgtacacccttcccagctcgcgtcctctcccgaagcccctctgacgggttcttcgcttccctcttggccttgccttcggtgcagactcccattacagg

SEQ ID NO: 3 - DNA, 2401 bp, Homo Sapiens
ttgcccctaaatacatgatgccagccccctgcacagataacctcctgcttttatagcttgaaatatatttgatctaaaccacgatttgacatcttcagagagagagaagtagataaaagtctccattccaggttggcagtagggatcctgcagaagtggctgaaatgaaatttggcctacagagaataagttctacagtcattttgtttctgcctatttcctccagattcaaaggcagattgggtcatctcggaactcatgtctcctccaggacacagcaacaacacattttcaaggaacagcctcattatttgtaaaatctgtagagtataaaacataactgctccactgacaggaggttggatttggacttaatattgtattattctgtccttacattatggcttgataaacagaatgtgattccaattctgattccaaagtgagactctcccagatcatccatgtcttctcattctctttgtccctctagctctctctcccttctcatccccaccaagaagtggaacttgaacctgccattccctaaggtctgtgcagtgtctgtgatccagaggacaggactgtgaaagtgtccctaatatatcacaatgtatatctcttgttttctttttctctctacaacttgatccttcctgtccccatttgtccccgagttgtaaggtgcagattaaaggttttgtcatagcagaaggaaatcagagggagatgccccgtctccagaggaaagaagttgagtttcccaagcaaaacctaagcagagagtgcacattcttgtctgaaagcttggagaagcagcagaatttccaggacacttgaaagcacgctctggcaaagccccggatgaaagtgttttccaaccattaatggcccaccagcatggcttggtttgtgattccagaattcagaccacttcacaatctcacacagttacagcaagcagctttgaattcctgctgcttggtctgagagtgcatcccatccatcgatcggatggctctggggtggccatggtcccaaggcaaggaggcacccagcagaggatccctgaggcctggcatgtttgcagattgagctacagagaacaccttgaggtgtcgcaagtgtccagagagccgaagtgtgtagggtccaaagcaaggtccttcctggatgtgcccgggagctccggggacctcaagcgtgggcctcagtctccatcttggtggctggcttgtaaatgactcccttgttatcaccttttttgatactagaacagaaagaacacataactcttgttagagaggagagcgagcgagccagagagcagcctgactcaggtatggaatgaggccgtttttaaaagttggattcctctctttgggacctttccccaattctgttggtcttgggagggagtgtcaccaaataaagctttaacaaaaacagaacttgttcgttttccaactgttctctttcacacctaacagtagtagacctatattttgaaagaggtctcgttgtcacccccctcttcaaacctctgattccataacagggttcccagaaacctttttatttttcataccccccccaaataaattaggttttaggaaaagccaaatgtcacaataaaaacatggacaaagggcatgaagagttaatgtgagtgagagatcaggttttccttcatctttctttttgaattcatagaccaaaaagcatatgtaaagatcttgataagaagacagcctggctgcttaacttcaggcacaagccccaagtcaagagactcgtccaaggccatgcaatagcagcaagcaaggcacacacgcttccaaatctgagcacagtgacccctgaaccctttgaacgaccagggtcacatgtgcgtctcatgcaaaggaggccagggcacgggtgctttggggacggccctcctagggtaagtggtggtccaggtgactgcggctcttcatgccacaaagctgccttcccaggcagactaatcatcatggacacatagctgtccattcccattttggacccaaaccagctcacctcttccttctgaaaagccaaatggacaccaccaccacaatacagatgccaagaatgccagccagggccagtgagaggatgatgcctggtgaagaggtagagggcacacattacattccttccttcccctccatcttagcccatggcccccgggtgtgaaatcatggcccagctgcataatcatccacagaaaggaataatttccccatccctgttctcagattctggtctttggcttagtgggactggctggagtattttgaggtggccgtttgcaaattctagtggttttccagcagatgctctcaaacttacacaagggtcatctgaagagcttgtt

SEQ ID NO: 4 - DNA, 3001 bp, Homo Sapiens
gaaagactgccgggcgcagtggctcacgcctgtaatcccagcactttcagaggctgaggtgagcagaacacttgatgtcaggagttcaagaccagcctggccaacatggtgaaaccccaccccatctctactaaaaatacaaaaattagctgggcgtggtggcgggcgcctgtaatcccagctattcaggaggctgaggctggagaatcacttgaccctggaggcggaggttgcagtgagccgagatcacaccactacactccagcttggacaacagagtgagactccgtctcaaaaacaacaacaacaaaacccaaaacatctgtttaaagtttaagacatgtatacctgtgaaagttgattacataaattgggtcattcttgaaatactcaactaaatcagagttgaagggccagggggaagaagcattcggggcacacagcatctgcttcaagaattaaattttccacaagtccaactgctgaaccagccttctgtatccctaagaccagttttacctaatagctgctaaaatgaactgccatgactctaagactggttttacctaccaccatcgctcaccaatcagagcttgctagctcccacaagctctagtgtgaatgagctttcttccaaaacagtatgtaatactgttctttctcataaaacccggaaccttctcttttttttttttgagatggaattttgctcttgttgcccaggctggagtgcaatggcgcgatctcggctcactgcaaccttcacctcccgggttcaagcatttctcctgtgtcagcctcctgagtagctgggattcaggcatgcgccactatgcccaactaattttgtatttttagtagagacggagtttctccatgttggtcaggctggtctcaaactcctgacctcaggtgatctgcccgcctcggcctcccaaagtgctgggattacaggcatgagctatcacacctggccgcaaccttccctttattctcctgatcataccaatgatcagcccggtctgtgtgtatgccatgaattgcagctcttgcttaccaaataaaatgtttttagagatttgtctctatattatatttggctttgacataactattcccaaggaattctatctttaaaaatccattcttatagaaatgaaagcaccaataaatgggaataagtacgataatccacatcgcagaattgtttgtagtggcaaaagttgcaacatcctaattgtctatgagtaaggaaatgattgaataaattactgtacatctatactaaagttaaatttgtaagtactgaagtacaggcacggctattttttttttctttttgtggaaacagggtctcactctgtcacccaggctggagtgcagcggcaccatcttgggtcactgcaacctctgcctcctgagttcaagtgatcctcacacctcagcctcccaagtagctgggactacaggcacgtgccaccacacctggctaattttggtttttggcttctttcttaattggtatgtttacttaaaaatatagactaacgggctgggcatggtgacttacacctataatcccagcactttgggaggccaaggcgggtggatcatgaggtcaggagatcgagaccatcctggctaaaacagtgaaaccccatctctactaaaagtacaaaaaattagccgggtgtggtggtgggcacctgtagtcccagctactcgggaggctgaggcaggagaatggcgtgaacctgggaagcagagcttgcagtgagccgagattgtgccactgcactccagcctgggcgacagagcaagactccatctcaaaaataaataaataaataaataaaataataaaataaaatatagactaatgatcctgtgcttcaatgtcattgtggttatgtgctgatgtccataaaacataagttataagggactcttcacaaatacactccagacagaagggtaaacagaaatgactgacaagacagtgccatttcagacatacttcccttaattattaatacttgctagaaaatggagtttgacattatttacaattataccaatattcacagaggccaactgtcacaggcattaagggcacaccagggccaggagacctcatttcagacttcccaaatatttttatattttagctattaagatcagttaccagagctcaacttgttcttaacaagcagaatttttatgtccattcaaagagtctcttatacctttctgggcctatttacttgcagagaacagtagaaactgtaaccaggctcttcatatcatgcattcacatgtgatgtccaatcttcatatgctgtccaatttctttaagataaatggagtgactcgcagcagggccacgtagatgagaaagttctgtatggagatcatatcctcgtgcatcttccgtttcatctccgtgaggtccagcttccgggcaaggcccccaatccggaagatcagctgcctcgctctgctctccctaatggcccccttacacccggaactcggcctatcccctcgccccagctaatttttgtatttttagtagaaatggggtttcgccatgttgcccaggctggtcttgaactcctgggcacaagggatctacccgccttggtctcccaaagtgctcagattacaggcatgagccaccacgcctggcccaacatggctattattttttaaagtgctaaattatggccgggggctgtgactcacgcctgtaatcccagcactttgggaggccgaggcgggtgaatcacgaggtcaggagatggagaccagcctggccaacatggtgaaaccccatctctactaagaatacaaaaaattagctgggcgtggtggcaggcgcctgtaatcccatctactcaggaagctgaggctggagaatcgcttgaacccgggaggcggaggttgcagtgagcagagatcacgccactgcagtccagcctgggcaacagtgcgagactct

SEQ ID NO: 5 - DNA, 2501 bp, Homo Sapiens
aactcaaaagagaaatctgaaaggttcattgggcagtgataagagcaataacattggcattgtttctgttatatacagtaggttaaagccaggaacccagcttttcagaaaatcaaaaacaaaatcaaagaaaactctaaaacgtgagttggaaatagcagtataattcactgaggtttcctttttgataatatttatttcctttccctacattaaaaaggccaggagcacaaccacccaggtaggactaaatgccccttgcgcccaaactgccctaattaccgcttcccataaaaggaacccaggatccttggataaatgacggttcccaggtgtgggtcagtacaggtgggatttggatcatctccggttttgttttggggtttgtttttagagactgagtctcgctctgtcgctcaggccggagtacagtggtgcgatctcggctcactccaacctctgcctcccgagttcaagcaactgtcctgcctcagcctccctagtagctgggattacaggcacctgccaccacacctggttaatttttgtattttagtagagacggggtttcacagttaatttttgtattttactagagatggggttttaccatgttggccaggctgttctggaacacctgacctcaggtgatccgcccgcctcagcctcccaaagtgctgggattacagacgtgagccaccatgcccagccagaacatgttttaacaaaaagttaagaagccttcagacttttgtcctgcaaacactgggccaacttggaactcccactgaccaaaaacaagagacttgaggcatcaaaatgacgaccacatgctctcaacacatcaagtgtataagacttgtgagctcataccaaaaatgtaaaagcttattcctgggtcacctctggagaatgctggcaccaactcatcctcaaagctggtaatcaagaggaataaaaaacaaacaaaacgagcatttctcctttttttggttgaaactgtgtttcagggtaaccaaataatcataaggaagctcttcttaatagaatttcaattaacagatgtggaattttaagaagtctttaaaagtgacttttgcaacatcaatggcagctaaaatcctaaggaagaaggttggtgggctgggcatggtaggtcacgtctgtaatcccagcactttggggggccgaggcaggcggatcacttgaggtcaggagttcaagaccagcctgaccaacatggtgaaaccctgtctctactaaaaataccaaaattagcgaggcatggtggcacacgcctgtaatcccagatacttgggaagctgcggcaggagaatctcttgaatccaggaggcggaggttgcagcgaggcgagattgcgccagtgcagtccagcctgggcgacagagcaagaccctatctcaaaaaaaaaaaaaaatagaaaaaagaaaaagagtgtggggttttcttgtttttgtttttgagatggagtctcgctctgttgcccaggctggagtgcactggcgcaatctcagctcactgcaacctttgcctcccgggttcaagtgatttctcatgccttagcctcttgagtagctggggccacaggtgtgcaccaccacactcagctaatttttgtatttttagtaaagacggggtttcgccatgttggccaggctggtctcaaactcttggtttcaagtgatccacccgccttggccttccaaagggctgggattacaggcgtgagccacgtgctggccttaaaattgtgtttataagccaggcatgatggctcgatactcgggaggccgagagctggaggatcagttgagcccaggggttcaaggctgcagtgagctgtgattgcaccactgcactccagcctgagtgacagagcaggagcacatctcaaaaaaaaaaaaaagaaagaaaactaaaaagttaaataaaacaaaatcagaaaccagaaacacaataaacactaaaactcaagattgcaaaacaccaaatctatatttacacttccacatataataacataactttaagctgaaatatatcataaataaaacaagtaatgtctactgttcgacaacttaagtatcaacaattaaaataaatcaaactggaatgaaataaatacataaacaaaaatccaacgaattgtacctctattatatgtactgttgtctcaaagaaaaaaaaatataaaaccagtagtataccaatagttaatactgatggacacaaaaacatattttgaagtacaaagggctgtaggaaaataattggtatttttatacattcagaaatgtggttaaaaagagaaatctgaaagcccaaaaaattccagcataatacaaatcgacttgttttcaaatagatttggtgattcttttttttaaatacaggtttaaattccagccctctattatcacataccccctttaagatttatggttctagtcacagcaagctctctgtaacactcattggat

SEQ ID NO: 6 - DNA, 4001 bp, Homo Sapiens
tttgttctcttgaacagatccaattggttatgtgaatttattatgtgatagaggtgccatttcaaagcagagagggaaaagatggattagtttgcacatgatgtagaggtaagagactatgattttgaagagtaatcaagctgaatccgtatagaaaataaattttgaaatgatcaaacatctaaatgtaaataataaagccacaaaagtgcttgaaaaaaaaaacggggtttgttataggagtgtgaaaagcatctttaagcaagcagcagaatccagttgtgatgaaggaaaaatggatatatttgactacataataattaaacatttttgtttggcaaaaattatcataaataacatgaaaaatatttgtaatatgtgacatgtacaggagagacattgctggcgggaatgttatccatttactttttaggagtaagttgacaaattttgcatcaaaatggaagacttttttgtagcatttgagctagcaaaaaataccataaataacaaaaagtgcaccaagcaatctaaatgtacatgtgtactggactggttcaataaattatgggacatctatgcaagaaaagatcatgcagctgtttagaaaaatgtgcactaacggaaagatgttttatatataactggaaaaaaacaggtcgcagaacagaaggtatgtatagtgtaccatttgtcggagagagaacctgaataattagtatacgaatagaaaaaaaatctggatagcaaaatgttaatagtggttatttctgggagatgagtggcctttcattggtgtgttatatattactgcattgtttgaatttttacaacaacaacaaaagaacaacatattacctttgtaataagaaaaaatgaagatataaaaataaattcaatgaatgacttgctttcagggggcggtttgagttggaagagcttcagactgagcctggtacagtggcataaacatgggctttggcgtcagacagccctgagcggggccccattgccccacccccgaggaaggcgagggggggtggcagggggctgcggaaaggggctgggctgggttgggctgtctgcagctctagtccaggaggctgagacttcgagagggacttagagaaggcagacgcatcccgaactcgctggaggacaaggtgaggggcgttgatattggggttttatggaggtcagacagtggttccagacccctcgaacccatagccaggcagatgagcaattcttactgcaccactgcagctgaagcagaggtgacctggagtggggtgtaggcaatgaggacgactgagaaagtagtaggctgtacagactgggagcagagactagcggagggaggaggggagaaaaacggggaaccaggaatgttgggagggggacgaggaatacaaggagggaggggaacactgagggggagtgaagatccagagaagagaatcggggatgcagagagggattaaggaatactgaggggcagggtgtgcaaacgtaacacggaggaggatgtaagaaatgggaagaaggaattctggagtaaataggaaatgtgaggtaggaatagggagtagggagccaggctaagggaatacggaggggggcataaggaatgaggagcagggagcgggggaggggcagacaggctgggacggaggccccctagggaggcggaaaggggcgggaccacttccggcctagagaggggagggcagtctccgagtttcggaggggcttggagtgagtggacgcactcgggaattgtaggaggacgaggtgagcagccgggtcggcttttggatgagagccccgctaggggtcggccccaccctctgggatctggagaaaacctgccttaaggaccggatcgtaccggatccatccggctgggaagggaggggactggacccggtttggccgggcccaagatggaatcactagctcagtatttatttgaggagggggtgtaatagggaaggggcggaaccaagatgcgcctgtttggaggggggcgtgttaggaagaagggcggggccaagagacactggactctgtagggcgtgagtaggggaggggccgggtccaccagacactgcgacaattttggaggaaggcttgttgggcagggggcgggaccgaatggtactgcggacctggagaggggcgtgtgttggggcagagtgccagactgagaccacgaccattgcgcatgcgcactatgtttcgctagaaaggggcgtgttgagaagggccagcactgagaagagccagctgctgaatgcgcatgtgcacggtggacatcaaagaaagggctcgtgctgggaaagcgggcggggctgagagcggccctgcagccgacgcgcatgcgctctatcgacctgcggctgggtggggggtgcactgggaaaaggggcggggtcctcagagctgccgcgctggcacatcttcctggagaaggggagggtgcggctgcagagaattgagacttagaagctttgaattcctgtatctgagaacggagtcgttgggggtggtggagggggttggaattggggacctacggaaggtgaggatcagcctccaggcacaacaggggagaggacgttcagtgggcttcaacttgacccaggccttctccccttcaggctcagctcttgccaggccaaattgagacatgtctgacacaagcgagagtggtgcaggtctaactcgcttccaggtaaggcctctttctgtcctttccccagctgcttttcctctccagcccttgttgctgcccccaagtcccttggctcttcccctcccatccttgtccttctccacctactttcctgcctgggtgtccccctgcccagtggagggagggagagaaggtgggcgggcccctcttctgccatcagttcttgctcagaggaaagggaggccttgttgggctgaggtggtcagagcacaccgcaggtaggagtcagtacaggtcagagaagtgtggccttggaattttggagccatttgcttagttgggggtgaggagaaggtctatgaacttccctgcttcctcttgcaggctgaagcttcagaaaaggacagtagctcgatgatgcagactctgttgacagtgacccagaatgtggaggtcccagagacaccgaaggcctcaaaggcactggaggtctcagaggatgtgaaggtctcaaaagcctctggggtctcaaaggccacagaggtctcaaagaccccagaggctcgggaggcacctgccacccaggcctcatctactactcagctgactgatacccaggttctggcagctgaaaacaagagtctagcagctgacaccaagaaacagaatgctgacccgcaggctgtgacaatgcctgccactgagaccaaaaaggtcagccatgtggctgatacaaaggtcaatacaaaggctcaggagactgaggctgcaccctctcaggccccagcagatgaacctgagcctgagagtgcagctgcccagtctcaggagaatcaggatactcggcccaaggtcaaagccaagaaagcccgaaaggtaagacctctgcagtcaccacccttggttttctactcctctctcagttgattcatttgttctacaaacatttagaaagatccctgtgctcatcagggctgtggggggcactgagagtaatgtgatgtaattcctgtcttcagagagcttgcagactgatggggaggtgcaatctgaatgtaatgcagtttatgtttacatagtagctgccctgtattaggccttgagctaagcacatttatgcaggttatctcattaaatcttgaaagtaattctcatagccccaattttatggagaaggaagctgagttccagagaggtgaagcggcttgtctaggatggttcaagcagagccagtagtgggcacagaaagagaagaagactcagcctccacccacccttggtttgctcctggcctgctaggcag

SEQ ID NO: 7 - DNA, 2501 bp, Homo Sapiens
aggaacatagtcaaagattctgggaattaagatgaggacactttggaggggccattattcagcctaccatggaagatatcatgagagggagttaatacaaaatgctctagaaacagagaaaggcagccaggcacagtagctcatgcctctaatcccagcattttgggagggaggcgggtggattgcctgaggtcaggggttcaagaccagcctgaccaacatggtgaaaccccatctctactaaaaatacaaaaattagctgggcatggtggcaggtgcctgtaatcccagctactcgggaggctgaggcaggagaatcacttgaacccaggaggcggaggttacagtgagccgagatcacaccattgcactccagcctgggcgacaagcatgagacttcatctcaatttaataaaaaaaagaaaaaagaaaaaaaaaaaaaagaaacagagaaaagctggctaactctccacagtgggaaaaatgtcccaggaaaccacagcctccacattaaatattcaaatgagctaaaacccatctaattggcaatctcagcctcattcctttaaacatgcaaactacctaaattcccatcaaaccccctacaccaggccagccaagtctcaaaatgcttatataccctttaatagaaatttccaaccaccacccccatttcctaaggaaatggctgtgtgcccttgaccctgccctgacagaatcgccagtggcctttgaaccatggcactcaattcatggcatggccagcgagctacaaagtgtcctagcatcaaccaagcaaagttataaaagcagatttagtggacaataaggaacattagttttagagtcaaaaagacctgggttgggtcccagctctgccatttaccagctgtgcaacatcggaaaagttaccttcctcttctaactttggtttcctcacctgtgacatgacagtggctagaggacctcactcatagaatcactgtgatgacaagagcagccaagggtaagtctttgcacagggcctccctggtcattattgggtcaacaagacataaccacatgccttatctccacttccaaaacccaaacagctctcaaaaacaagtcattgtagctcatttggaagaaaagactgatatgaaccaatatgcaactacctataatctttctctatccctcttactgtgaatatttgctgtggaaatattaacatgtttggtctccactggggtaggactccacatgtgtaggactccactggggtgctacacatacacatagtagatatgccttaccaccttcctaaaattggataattaaatttcacaacttatctagcccaaaggtttcagagacggtagacctgtatctttatgagggcgaggatgagaatataacctggcctgttatcatgcaccaaggtacctgctgttctcatgaagatgtctgcagccagccagccagtctctacaaactccacccccaacctcgctatgctcccttccctggaactttccaaggggcccttagaatttgtattcagctctcacaggctgagaccagggtgacatcctgggaaacctgcctagtgatagccaaggtgtagctccagatgaaaggcacacaactttaaatataaaaaagccattcaggctaggctcagtggctcatgcgtgtaatcccagcactttaagagactgaggcagacagatcacctgaggtcagaagttcaagaccaggctggccaacatggcaaaaccctgtctctacaaaatatataaaaattaacaggcatggtggtgcatacctgtaatcccagctactcaggaggctgaggcacaagaatcgcttgaacctgggaagcagaggttgcagtgagccaagcctgcaccactgcacttcattcaggctgggcaacagagtgagactccatctcaaataaataaataataaagccattcaactaaagaaccgattatcaagcagaagcacaaagcccaggttccatcaggtttttaattgtacatcagtgactgtgaaaaagcaattattcccataattaaaatacaaactataaaaaaacagactcaaagaaaagaaagatgacagagtgaaagaaggtacatttctttcgtgttcaaaccacggagttcacaacacagcagcacacacagctgggcgctttgtggtctcggcaccctcggcttccccttcacggggccgctttcgactagtagaaggctgaaaataaaggaaaatggagaaatgttcaaaagaaaatcactggcttctttaagattatcaaagttcctcaatatgcttccagtaaagtgggggcatttgatgtgaaattctagaaccaaaaattactggttgtcatcattgacaactgagtcctcaccacagcccccaactcagacatgcttatctaatagatatttctctcccttatggcttctgacctctgaacgatgtatactgaaagcaagtagcataac

SEQ ID NO: 8 - DNA, 3501 bp, Homo Sapiens
ttgttttatatattttattatactggaacaactcatgccctcggtctcttggcttggcacctggatggcttgccgcccacatctcccccctttttattaactaggatcgccatcgccatcattgcttgtcgttgacttcggatttgttttcggactccttggaggcatctgcaggctaaaaggagacaacgtaagcataccaatattaataatgccagtgacaacaatgatcctccaaggggtttgatctatttaaagggattaagatcagataattgtttagttatgccttcaaaaatgtctgagccaggaacagtggataaatgagcttgtgaatcctcgaaaatttgctctttaagttttgaaatatccaaggttaagttatcatcccaggcttttaaatgtcttgagacattttcccagctatgttgatatttattataagcataaggcattatgcaataatcagaagtattccaatcactctgtaattgcatacggtgttccaaattcatatctcccagccagattacactttggcggagatcattaatttgattagctaatttttgatcaatttgagcctgagaattccaaagtctggaggagtttttctgccatgcttcaattcaacatattgaacggtttgaacagaattgtggatggcaactccagcagttgctgctgttgcagtaaccgcaattagtcctgcaatgatggcaataagagtaaaaataaatctctttgttcttttgcggatacctttaagaacttcattgactatgtgaatagagggggaagactcccatggacgatgtaaagaaactggtatccataccccctccctagcccttaccaagagagtacttgtagtgggattaaaagtagcatcaatgcacgtgaacagcttacagttatcacattctatagtttgtgtattgggaatgataattatatttccaaccaacagcatgtaagggggtttgacatagctcctgatgggtatcacccgttcagatatgagggtgatgttgaatgtgggtgttttggtattagtgtgaaggagttgataggtagtgttccatatccttattcctgtcatagctgcagctaattttcatagttgaggatgttctggggtaacaaagggatgaatcatttttggtctaggaggagtaatgcctgcatccatccatttaaataggtaaggggacacccattgtctcagcctgtatgactgccatccatcctctacataatctaacaaataattaaactctgagcatgaggtatttttgctggagcaatcttgccaataatgcccttttggagcccaatcaataacaatacctgcggctagactttggagcacaacggccttaggagcattacaattattccataaaattgaagtcactataaaaggtccctttgtaggtttctttaaccaaaagagaggctgggcacagttgctcacacttgtaaacccagcactttgggagaccgaggcgggcagatcacgaggtcaggagttcaaaaccagcttggccaacatggtgaaacccctgcctcagcttcctgagtgctgggattataggcatgtgccaccacgcgcagctaattcttgtattttttcagtagagacgaggtttcatcatgttgcccaggctggtctcgagtacctgacctcaacctgaggtgatccaaccacctcagcctcccaaagtgctgggattacaagcatgagtcaccgcacccgggccccagtcactttagaatagcatgttgctttgtattcggagggtctctctgcaaatagcccatcaacactgagcgtgcctggaaagacctggttttcaaataactggcttcgtctgtgtaaaacgagtcttgttgtatgcattaaaaattatcttggctgggcgtggtggctcacgcctttaatcccagcattttgggaggctcgttctgttgccagggaggctgcaaaaggaggatgcggctatttctgcttccatcatggaaggctgggattccacaggcacagaaaggaaggagggagagatgggaatgtgactgtcctccagacacagcctctggcaggatcggatgtgggagagtgagggtcccaccccagctggggtctacccaggtccatgtcttggacatgttgagagtttttctggaaggcagggatacagtgtggtccaaaaacacacaaatgcccctactggcccaggggttgtcacaatagactggaagggtgacacatcccaggcgcttgccacccatcacacgcacctcctacccactggcatccttccaccccaggcacacacaaagcctcagtccagagatcaactctggactcagctctgaatttgcatatcctgtgtgtagattcattcttcataacctctgcccagcctagcttgtgtatcatttttttttctctattaggggaggagcccgtcctggcactcccattggcctgtagattcacctcccctgggcagggccccaggacccaggataatatctgtgcctcctgcccagaaccctccaagcagacacaatggtaagaatggtgcctgtcctgctgtctctgctgctgcttctgggtcctgctgtcccccaggagaaccaagatggtgagtggggaaagcaagggatgggtgctggagaggactggaaggaggtgaggaacaggacatgtggctgggagacaggctggatgcagctgggataccctggcatacggcaggaatgggtgcccaaggctgtcaactccctcagctcacacacttccaggagcattcagggagcctctgcgctggcccgaaataagaccttcaggaatctgaatctaaaacccctagtttacagtgaaaacaaagactccaaagaccaagcgacctgcttggggtagacagtcaggacggagtaggaaccatatgcctggagctgcttctgctcctgttccttccctccttccgatggctgggtacacctgcctgacgctgatgaaaagagagagcagccccaaggggaaagtgggaaggcaggttggctggagggatggtgctagaaggaaacccgtgcccaaatcccacactcagacaccactgcagtgggtctggaaggcgagtggctggaagagaagagagtgggagctccgggagatcaagagtcactcctaggataagggaaggaggctgtttgtggcatgagaatgtgcaggataaagacatggaagcgaatggcttctcagttgtgtgagtttaaaattcatgacatttacaaattgtcagaaaaggtgttatatgtttgttatataacaatcactttggaatgttaatctgattctgtgccaaaatctgaattactcagggttctccagagaaacagaactaataggtggtacacatatacatatatatgtacgtacacatacatacatacactgtatacacatggatacacacacacataggaagagat

SEQ ID NO: 9 - DNA, 4701 bp, Homo Sapiens
cccacttcggcctcccaaagtgccgggattacaggcgtgagccaccgcacctggcctaatttacttctttatgtagtctattgtgtatctatcttttccagggaacctcagctccacaagggcagggctctcttgtcactttggtttatggccatatcacagagcccatcccagtgcctggcacatattaaggaatgcattaggattccaaaaccagccaggagcggtggctcatgcctgtaatcccagcactttgggaggccgaggcgagtggatcacgaggataggagttcaagaccagtccggccaagatggtgaaaccccgtctctactaaaaatacaaaaaattagttgggcgtggttgtggacacctgtaatcctatctattcgggaggctgaggcagagaattgcttgaacccgggaggcagaggttgcagtgagccgagatcgcgccactgcactctggcctgggcgacagagcaagacgccatctcaaaaaaaaaaaaaaaaaaaaaaaaagattacaaagcccagaatgccacaagaccacaggtggtgcagtgaacagggcattgccttgagagtctatcatccctgggcaagtcattaaacataggggtgggggtgggagcctcctgtctgtaacgtggaggtgtcacgtgccaagggctcaggcacacgcgcgcgcacgcacaaacacacccattagtaaggacacgacccctggcattctaatgcgatttatacttttccatgaaggaattcatttccccctctcactaaccccagagacaggtagagccgacaggtggaagaactgaggcccgagagagacagcgggggaccctccccgcgccacggcacagcagctgtccgaccccctcctcacgcccggggggcgcgacggctgccgagggtcgcgggcagggggcgcggcgccggggactacatttcccaggagcagttgccgcggttccgccgttcctggggtttcaagagcctcgcgttaaagggggcgggggaggttgcgcagtccgccagctggaagatggctctgcgcccggtggggacccgagagccgcctgcctgggtgcccaggcggggtccggctgcagtgaagaagccccccagctctgcagtgtccctgaggggaggcgaggcgaggcgaggcgaggcgaggccaagccaattggaggccgtctttcctcgtcttgcccgcctcggcttcggcctctgcgcccaagccccagggaaccccctcccttcccctccaactccccggaacaggggaaggggcggtgaacctcgccgcctggcgggagaaggggtgtccactagctggaagcccctgcaacccgaggcaacccctttccccaattctggcttcagttccgggaatttacaggtcgctgggatgggcggggagaagggacaggagagatacaaaatgaaatgaacgcccaggtgtcagggagctgagccttacagtaccccgcccccaatccatccttctaagtcccgggcctccgcggtaaaataggggtgatggggatagtgatcaaaggcaggaggcgcaaaggatccagaaaccggtggggagcactgtgcaaactgtaaagcgctgtgcaaataaaattattgatcgtcgtgtcattggattcatccagtctttaagacatgcacggatctggggcgggggatggggtgacatggttctgggctctcagggtggaacatctcggatacggggagggggggctatttgggtgcgtattaacccaaccaggtcttaatgggaacccgagttgtctttgaaaataaccaaaacaaagccaccagaatgttgtgttttcaaatgacgaaacttaagagaaattgacaccatcaaaagacgaaccttgaccttttgaactaacctgaccccccattgcttcccttccccgcctgtgccacggagataagcccagagagaaggcatctgacaccgagtcttgcgctccccctcccccttcctcccctaatcatttggattaatccatcccttggcgtgcgggggaaacccattaatttgtcctggcttcagagactcccaggtccagtaggagccctcccacacccacgcagctacgatcccgtccccaacatcaaaaccctcgaacccctcccctttacccctccccagtagcccactgtgtctgcaaacagctcttggaccataccgggatgcgttcatcattttgaccagcaacaaactcccactcccagggtattgtttaagtgaacagtgaccggcctctatgcttagggaataaaagcggggttgtgggagaggggcccagggagcaaacgtcgcagaatctcagcccagggccgctgccaagcggacccggcacgtgagtaggaggtcggccgcagacaaggggtcctagggtctctgaggtctctcctgctggcctctgggcccctaaagcccctcgagcttcagaactccctacagacagtggcgccccgtgtccgcctcgtctacacctgccaagcagcacgggaaaatctgtgtgcattttaacaaagacatcgcatcttcccagcaaaatggcggtggtcgcggccacggctctctaaacaactccacactttccgaggacaggtcacaacccaagggacataaccccctcctcgacctctaccctagcgccccgctttcccaagtccccaaagcactcagggcctctcctcattacaggggccccccggaccgtccctggttagagcttctggggcagcttctccattgtggaccgccctcccccgcccccacattgccttcaaggagccttgggacggggactgaacccccaggctgggcctcacggatggggggcagcgagttctgtctctgacaccccaaaacttccaggctaagagaagcacacaaatgaattcccgattagggtatatgggagatgtaggggtctttgaggagaagaggccacccgggaggccctcctcatctctcagagggtccgggcagcactgggggttcggcctcaggagggaacctcaaggcagaggtcggggggcgcgctgggggagagacggcagaggagggggaagggacaaagtttgaaagtacccttccaactctttcagggaaagtttccttgggggccccatggacagagggggtagaggtgtggagggaccggtggcggggtgacccccgagaggtgaccggaccccgggggagcgacccctcccccctgtcccggctcggcccggctgggagtcgcccagctcggggccgcgtgtgttagttggggccgctttccggcagctccaccgggctaggggaccccgcagcgggccgggagcagagcccccggtagcctcaggggagagctttgctacggggggtttcccgcaccgaggctccctagccccgcagagccagccccccgcaaaggggaaatgtgccggcacaccagcggtcctcggcgccgtttggggtgcgtggcgggcgcggggggcggcggccgggccagcgggccgcccggcggggaagcccagggagccaggcagcggcccagggcggcggcggggagcaggaaggcccgggccggggggaaaggtcggatttgctcggcggaagaaacacagatggcggcggcgcagcgccattccgggccgggagcaggcagccagcagccctgtcctcaccgcggtccgcccgccgccgctaaatacccggatgcgccgcccaagcgccagacgcggagctgggaaaagggaggcagaggaggcggaggcagaggcagaggcagaggcagagcccgagcccggtgccgagaccaagcgacagaccggcggggctgggcctcgcaaagccggctcggcgagctctcccgacacccgagccggggaggaaaagcagcgactcctcgctcgcatccccgggagccgcactccagactggcccggtagtcaggggctcaggagcagatcccgaggcaggctttgctcagcctccgacgagggctggccctttggaaggcgccttcaacagccggaccagacaggccaccatgaccgagaattccacgtccgcccctgcggccaagcccaagcgggccaaggcctccaagaagtccacagaccaccccaagtattcagacatgatcgtggctgccatccaggccgagaagaaccgcgctggctcctcgcgccagtccattcagaagtatatcaagagccactacaaggtgggtgagaacgctgactcgcagatcaagttgtccatcaagcgcctggtcaccaccggtgtcctcaagcagaccaaaggggtgggggcctcggggtccttccggctagccaagagcgacgaacccaagaagtcagtggccttcaagaagaccaagaaggaaatcaagaaggtagccacgccaaagaaggcatccaagcccaagaaggctgcctccaaagccccaaccaagaaacccaaagccaccccggtcaagaaggccaagaagaagctggctgccacgcccaagaaagccaaaaaacccaagactgtcaaagccaagccggtcaaggcatccaagcccaaaaaggccaaaccagtgaaacccaaagcaaagtccagtgccaagagggccggcaagaagaagtgacaatgaagtcttttcttgcggacactccctcct

SEQ ID NO: 10 - DNA, 2501 bp, Homo Sapiens
attttatagaaaagacacaagtgcaagcaccatggacctaagaattatttttcaacaaatgcctaagagataatcacatctacttaggggaaaatgtcacatgtttgagaatggactatggatgggtccaattagatgagagaggtatttagggagctgttctgagtcatgaggctgaggagaaaatcctctctttaattgaatttcactgtctacgcacctctcaaaacaccatctggatatgtgggctctactccttgttctgcagctaggtagcctgttgagtcacttctctggacttccacaaacactttcactcctgtttacagcaccatccccgtgctatcattacaagctcctcttcctctcccagatgtctacaaagaaaggatgaggtaaagtccaatggacttacggtttccactgacctaagatggccacttgaaattatcagaacaaaattctctgatgaacttttcttctaaaacaaaactgaaaataaatggaaaagaaatatgaaatgtatgagagtttgagggagggactctaaagtgcttattgtttattcagcataatacatggtcaaactcaataatgtctttctcttccctgttttctctggcctcttccaagtagaagaaagcatttaatatcagaagtctccatttttcataacagagttagggatatgttttttttttcagtttatacttggagtttaacaataatcataagcccaagatagcattttcagggatagaaatgttctttttaacaagaagcacaactaaacttttccacagatttaaaaattaaaagtaaatgaaactatattcacatttgttgttgattattttgtttgccagattcttgctcaaaacaatgtttgaccaaaaatggcattagggtcccaatggcgagacatctcctcagttactttgcagcaatcctcttgttcattggtgtgaatttctaccttattacccctttttctttctcaaaagagaaactctgaaacttgagattctcacaaacattaaagagttcatcttgtaaataatctgttctccccaatatactcattattccttggcttctaaaccaaagcctcttcccagtgctacgcagacttaggtcaatggttgaatctataaccgtgcccccaacccctgcaagtattgggttactgttgtgggtctgtatttccatctcactaacatgctggtgggttatctggatagttctttgtgcaaactgaacatttcttaattatactagtgttttcttggtactaattccccccacccccccaatgaaaaacgattatcatatatatctatctcaaacatagagatttcagttagaactgcctacctggaagtcgtaatactttctttcatgcagcgacattttagagataaaagttcaagtggatttgaagattcgaagtggaaaacaatttgcactggcaaagttgaataatgaagttacaacttatgctcagttatttcttgataatgggtagagtgacttattgtgttttccacgaagtttgagcttttgaaactgcagggcaccctacatggccatgacaatgatgtctgtgggaaaaggaatagcagctttgaaatattcacaaccaacacaattttgattaaacaaagaactctggtttttaatagttttgatcattaaaaaagtttaaacctgcatagcaatcatttcaaaaataattatttaatgttccataattaaactgtacacaacctagtcttgggacacagaagccagtgaggtgagtttggagcagtctggtgcagtcccaggagccaggagttgagttctcattggcctttttttttttgtcattctgctcatctaagtttttggatagttggcacaatctggctctgctgatgagtggatctgcactgggaagagagagcagcttgacccccatcccttcttgcttcccctcccccactcagccggattcctcaaagtcgctcaatgtctcggtatttcttcctcaaaatagagacctggtctttaaagaggacggggtcgagcctcatctgagagtggatcagcggcatgtagccaaaccagctggcaaacgtattcatgcagctctgtcgctgggcaaagtggtcagggtcagcccaacgggaagcccgagaagtctagggagaaggagagaaacaaggataatgatgagagaagtgcaaggtgagatggaaacattgcagaaaatggagtcaggcaaatgagcaagcagcaaagcttggggtctggcccggccaccaagtctcaccatctatgcacctgctgaaaatgcaatcgctgatattggtttttcccaaggtatgctacgttcctcagtgttaaaaacacaaaaacaaagattcatgttgactttaattctctaaaatttattgactaattctctggtcagtccacgacttagcaactgaaactcgactactacagtgactcaatct

SEQ ID NO: 11 - DNA, 4001 bp, Homo Sapiens
acaaaactgtgacagtcattacaggttttttaaagttatgtttcatgtgattaaaaatcatattttttccacttttttattatggctaataacactatgatatatatgaaaaagtcttagtaattcttttttttaacagtgcccaaatatttcactatcattcttttttgatatcctaaaaccaaaattttgtcacgtcctgttatctgatgctgtcatatttagtcttttactttggaattcccagtattttcccaaccagctaatatccacataatgtagcttttgcccattcacttgcccatatccttagggatacaggacttttaccaacacattttaaattgttttgcactaggattttacctttttttctttatgaggcaacactggccaatcattcccttctagaatgttgactgccagttgaaggctgagttctagggacttttctcaaacagaacttgagcaactagtgtatagtcacatatggagtacaatgctagctatgcagtgataaccacagggaatattttctaaattaggacatggaatgtcttctgaattgtcaagaaagaaatgctatcttcaatgtacttttgtaattaaatgtatccttattgataatccaggtattaagtagaacattttattaattagggcactccagctctagccttacagaaaacaacctgttatatgtgatttcatctgtcagagtgtaaagagatgccattgatcgtcagatgctcaaaagctagtcctctggatggttccattgataccataccttttcattctcaggacaacattgacatacaaattaacatttcatctcaacatcctaatttggagaaaacaagattacatatccctgtgaaaagaagagatggtactgaaattgagagggtctacagagatattttccattggaacagcaccttttattggaaaacaaagcaagaacagtaaaaactcatattttcattccttatttacccacatgaataaaaaaagaactagataaccaggtcttcctttgtacattctcttttgctgcaaaaaaaaactgaacattctgtggatcttgaaaatgttatctgatgaagaggttaattcttccacatagaaaaaaataatacagattgtttgcttttctcactggagtgagaaatcctaaatagttaaagtataagcatatccttccccttgaggttattgaaaggctaattaaagatgtgcttttcatgaaaggtattactgggagacttctttttccaaagggacattcaaaaaaagttaatagacaaagaccttggtagagtaccaggaacagttattatatggataatgaactatgaaacaaaaatcgtttttagagaaatgtgtaggccgggcacggtggctcacgcctgtaatcccagcactttgggaggccgaggcgggcagatcacaaggtcaggagatcgagaccatcctggctagcacggtgaaaccccatctctactaaaaatacaaaaaattagccgggcgtggcggcatgtgcctgtagtcccagctgctggggaggctgaggcaggagaatggtgtgaacctgggaggcggagcttgcaatgagccaagatcgcgccactgcactccagcctgggcaacagaacaagactccgtcttaaaaaaaaaatgtgttatgcactgataggtacaagcaaagcatgtagtacacaagaaagacatacatacaatatatgtatgacttatcaaataacttttgttaaattagtttctccaagatgtgtagctgtaacattaacatattttcttctcattataaatatatttcattttaattagattggttcttaaataggtatgagaataatatccctttctgatatggtttggctgtgtccccacccaaatctcatcttgatttggagctcccataatccccttgtgtcacgggagggacctggtgggaggtaactgaatcatgggggtgggtttttcacatgctgttcttgtgatagtgagtaagtctttgatctgatggttttataaagggcagtttccctgcacacactctcttgcttgctgccacataagacgtgcctttgcttctccttcaccttctgccatgattgtgaggcctccccagccatgtggacctgagtccatcaaacctctttttctctataaactacccaatcttatgctgtctttgttagctctgtgagaatggactaatacactttccttcatttcttcagagacattttagttttacttttggttaacttcaaatagactgagccatgctttcaatgccattagctaggtgattgatttatgaataagcacttatattaaagagcaattatttatattctcagtaatattctgttttaaaaagggatttggaggtttcttaaacggatactcccctgacgtatttatctgctttgtaagtctgttttatgtacttatcttcaaatacagggcatgtctgttttgtgatgactaacctggtgatgtcagaggcccaacattttaatattttcaacggatgaaatatggcatagaatttagagaaagtcataagtcatagatgggtttaaaaataaggaagtatcatttctccatatgtggctaacatttttcagttaatcaagttcaagcacagctgccatataaccaaagaacaggggattacaagggccttcaaaacataaagtagcttagagctcaagctcaaccttgtttctagcagctcctggtggtgtgtccccttcctgcttctgagtcctaagccaaaccttggccagtgagtcagagcacagctctgttcccacctgctctcatctagaggcacccttccttctactcctgttcactgtaaaggtcaactccaaaaatgatcacaaattaatggttcatgtcctgcaaacacccattaatcaagcctataatataagacaagtgtctggatttgttcacagaaatacttactgcaaaatcacacccagtactcttctgtacgtcatccactgtcaggccttcccagagctcaatcagagtcaaccctttcttcttgtccacatcaaacacagcctgtcagagtgggaagaaaaaggacaatgacaatttccatcaaaataattattatatggcacaaaacagaaataacctcgcaagttcgacgaggtcgggtgtggtggctcaggcctataatcccagcattttggtaggcttaggtgggtggatcacaaggtcaggagatcgagaccatcctggctaacacggtgaaaccccgtctctactaaaaatacaaaaaaaaaaaattagctgggcatggtggcaggcacctgtagtcccagctacttgggaggctgaggcaggagaatggcgtgaacccgagaggcggagcttgcagtgagccgagatcacgccactgcactccagcctggacgacagagccagactctgtctcaaaaaaaaaaaaaaaaggaaacacaagacccaggacaaaagaaaaatcagcagtgaaaaaatgtcaactgtaactatgatattttggtgaggataaatgccaactccctaatcagcaattagttgtggaacagtgttgatgccagaaaataaatgagcattgaccatggatggcatttgttactactgcaaccagttttttaaaaactacctcccttttgttaagtctaacacttttggtcaaaggtcaattagtgattaataatgatttgaacaaagaaaggaatgaagaaagagggagagagaaagggaatatttggaaggtgaaagcacatgaatgacaggaaaaaagtttataaatgatattgggtaaagaattacaggaaacagaagaaggtgctctgaagtgtctaggagtaattataagaggatagctaccctggtcctgaaagacatgcaagtaactgtttaaaatattctccttaagtcctgtaaaacatatagtctcaaaaaga

SEQ ID NO: 12 - DNA, 2501 bp, Homo Sapiens
gtccaagccccctttcctggatatcttcagccttaaagaacagtcacaaggccacccattggttgaggaagtcattggagaatgggagtttcggaatctggctgccgagtgacagcatccctgaatcatgcgttccctgcttgtcccagctttccttccatcctccaccccagggaggatgcagggactggccagaatggaggaagagctggaaagactcgtgggcctcagtccctcattgcaggctgaaggtgggcagcggagcacatagtcttgtcccttccaaagcatggccagtttagactgattcttcctatctggcttctaaagtctagcaccctcctaaagttactcaccttccctggctctgcggcctggattaagctcatttctattttgcaacccattcccccattttcctctctttcctctcaaatcctagaaaatacatatggtggggaagctaaggaaatttctattggcttttccccctttctgctgctttgtgccaaagctagaatggaacagtcagccccctctcccttcagccctctgttcctccccacatcgactctggccggaaccatccatcttactgttctcctgcatctaaacctttttgccaccatctccctctgccatctcttacttcagtctccctcctgctctgccagcatggagagtgagggaggcttccaaaaatgcacattctgttcagatgaaaggaaaaggctggggtgggactggtggatccatcgtggacctgttgggctcatgtggtgtggtgtccggagactgtgacttcctgagggtttaaagactaaaatgggatggactgaggcgcgtgctgtgtgcaccacggagggctggcctctgcctggctcggtgggtgcagatgaacacacgtggggaatcactgtcaaatccagtactgtgccccacaaaaaagctgagtttattgctcacgggaaactctgcctcgaggcaggcaaaaatgctattacgggttgtattaggagaatatgggttttctcagttttcccagaatgaggaagctcctcaatgcccctataggaactactttgaaaagttaatgcaaacctttgaaagaaaggaagaaagaaaaaaacaaagaaaaagaatagatttatatgcctatatatgactatatggagtcctgtagataaatacgagcccacttttttttttcagcctatcctcccccacagaggctgctgcgctacttacaaattgaattaaatgagggctgaaacggcacgcttcagcatgtactgtagtcaccgtggaagaacaagtctttccaatattggggcatgtattgatttctaaaaaatgtctgcctggggaatgaaatatgcacatgtatttcatattcacagatctgcttccgaaaacctctctatttaatatcactcaattatgaatttgttttgctttcagaggaatggaatgcattttagtttttataaatttggggagagacaacactctgcccaggtaagaggagaggaagttcaggggtccagctgtccatactgctggctagaggaggagacagatccgggagaggtcctggagtgttttgccttttcctttctccccctgaccaatccatcctgggaaaccccaatagtgtcattgattgccacatcctgggctgcatcttctagcgcccacctctcccgaccccaggccagggctggacgtgaaagttgggcccctgcctggtctcggtgcatgtccttcctgcccacctgcttgtcttccttttcctaactctattcgtctttctctctcttctacacaaacacttccttcccttctcttcctctcgttcttcctctcttcccttctctgttcatccaacttgcctcaaaaagaaaaccatttaaagggggggggtgtctttttagctttttgcatctctgttgttgccattttcgaagttgagcccttgctagagattccgaggtcctcagtttcctcaaatagatagatatatatttttcccttaaatgagatgaaatgagtggcgtcctggggtggagggaggcgctggctggagtcggggctgggggtgggagggggtgagggaaaggttggggggggacgcatcactcaacgttgctgctgtcgaaggtgtggcactgaaagtccccgtcaacgtactccatgcctggcagcttcatcccgtacttgtccacgcaccagcagatgccacgtttgcggccacgggaaggtttgcactggggtgagtagagcaacaggcggtgaggacggccgcaccccagggctctgctcctccctgccctgcctcttgtctaccccaaggcaagactctcatccccagagagttgagggcactagacccgacccttgggtttctggtgtccccatttcacggaaagacccagggaaaatgtgaatttaggcagcctacccttggcaagctccttcaatccctttctttcctttttttt

SEQ ID NO: 13 - DNA, 4001 bp, Homo Sapiens
ctcctttactagctttggtgaaatgggtggccgtgttgaggagatcccttttgcaaggaactgaaggtggctctagccgacagccaatgagaaatggagggcctctgtcccacagggaacaaagaactgacgctatcaacaattacacagacttggaggcagatccttctcccactgagcctggggatgagatcagagctctggatgacacactgatggcagttttcagatgaaaccctgagcagaggacccagttcagctgtgcccagactcctaatccacaaaactttgagaccataaacatgtattgttttagctgctaaatttgtgggaatagtgtagaagtcttcttttgcccctggagtatggcaaggttcaggctattgtcccatgaccacgaaaaattaggcacatggacatggagagtgagtagggcagagtagaatttattgggaaaaaggaaagctctcagcaaagacaggggtcttgaaagcaggttgccagtaaggcgtctgtgttctgtgtcttttatgtggcagaagctgggaagtcttctgtgggttttgcccagatgagagaagtaacattttcttcttggggtactacagctgtgcatgcctaagttttgccaaagggactccatcttggttattacccatgagtgcctaagcaaaacccatgggggtgctaaaaccacaatgctaatgtcatgtttaatgacattataatgagctgggttaaattagggacatttaggctgatttattgtgcccgcaccaaagttgggatggtcacttctgagcaacatcctagcttaagggtaacttcttccgtttttcctattaactgtagaggcagtataggcactgtcttgccgttgttcttgtgaacatagttcctttctatcccttctcctgagaccttccctctctatgtgcctatccatcccttaactacctcctctcttaacagtgttacacagcaataaataatgcattccctttttgatttctggtcatatcatcgatctagccccaggggcatcctcaatttctctgtcctgccttaaatacacaagggtagagcataccgctccctcacactatggaaattatatcaatagttatcagactgaaaaacttctgagctttatacctcttctggccaaaggctcccccatgcccaagatactggcctgaacacctaatccctgctcacagggggtggcaaaacatggcagttgaattgtctgcttagcaccttctgtctgtactattcctcctgacatcactgggtatccctgccatttgggccctctgaccatcactagagagatccttggcttctggtccataggggatggcaatctggcccacaggcctatctctgaagactattcagactctgctctgtgaaaggagagtggtgccaagtcatctccacaggagtcagtgtttcttaagtttgctttcttttctaaaaactagtttctactacacaagcaatgcatgagcacattctcttagttagaaaagcaagtcttagccttaacttggaaatgccctttaacttccaccatggagtctgggcctttatcccacttgcctgcagtaagactgttatgagtttggtgtttccctccagactcttctctatgcttggagatcttttttatttttttaagagacagggtcttgctcagtcacccagattggagtgcagtggcaagaacacagctcactgcagcttcaaattcctgggctcaagtgatcctcccacctcagcctcctgggtagctgggactatgcatgagcaattgcgcacagctaattaaaaaaaatttttgggagacaggggtctcactatgttgcccaggctggtcttaaactcctggcctcaactgatcctctcacctcagcctctgaaggtgttgttattacagctgtgagcaaccacacctggcctgttttggggatctttgcatgttagttcacacagttcagtctcattcttccgttgccacatggtactccatagtattgacaggtatttacacggtttccacttatttgtcattacagacaatgccacagtgaacatcttagtatatgtctctttgaatgttttttttttttttttttttttttttttgagacagagtctcgccctgtagccaggctggagtgcagtggcgtgatctcggctcactgcaacctctgcctcccaggttcaagcaattctcctgcctcagcctcctgagtagctgggactataggcacatgccaccatgcccagctaatttttgtatttttagtagaaacggggtttcatcatgttggccaggatggtctcgatctcttgacctcgtgatctgcccacctcagcctcccaaagtgctgggattacaggcgtgagccaccaagcccggccatggatgagtttttatagcatggaattgctgggtcataggatatgatttaaattttacaattgtcctccaaagtagctatactaatttacaacttgaccagcaggaaatgcatatcactttcctaagccttgccaacactttagaaactttttactcatcggatagaaggaaatatggtttctcactgttgtaattgataattccttacatcataaacatcttttagacatttttggctatatttctattttataaattgttcatggattttgtccatttttaaaaactcagttgtcttaatgatttataggtctttatataatctttatactagtgctttttgtctcacttgtcatttatttgtgggtgccttaggaaaagttgtagaatttgatcctattcaattggcaaatctttcctttgtgattgttattattttaaaaagtaaaagaataaagaatggctactccacaggcagagcagcctatggtttttttctttttacgtctttaaagaaacttctcctaccccgtggtcacaaaaattcttacattttcatcaatatttcaacagctttgtgtttaatgttgggccttaaattccagattaattttagtgaatagtgtcaagtggggctctattatttttaatgagtaagcaattgtcccaactctattggctagcccaccagtctgaaatactgcctttatcacactaaactcccatgtgtacacaggacggtttccgaactccggttaagtccatcagtaccacagttttacttgtgttatcctcacccagtcttcacagggactccagtcccatttaacacacctgctctctccaactgtgcaatctcgttttttctagtacccactctcagggcttgggcatgaacctacagcccttgaactcagttggggagtagggaaatgccagtatcgcagcgattcaattcatatcttgatgattctccacatatcctttttcccttttagcctttatacccaagagaaactcagctggacaccagtaacataagtgctattcattgaaaagagcaaagcaagagcgctgaccccttacggacaggatgaaacaaaacaagctctgcaagtctgcctcctgctcagcatacaggcttgttgccccactgggccatcttgttgttgatgggcatcttgcagaactgatcagactgtaagtaggcagcgattttctccaaagcctgaaaggaaaatacaccaaatcttataacgaccccaacccagtccaacagatgcataccagaacagcaacattcacgtgttgcctgcgtctacctcctccatttttttgtagacagtgcctccaaggtatagaagttaggctcttcccaagacttaaaggtctagaggtgtccaaccattgatcccattaggcaaaagccggggaagaatcctccactatgggatcctgcaggtcccaggggagcctgtgagtgtttttataagagaaaggtgcaggaaacgtcacctcaaaacggcacatgaaagccttcaggtttgggaactcatccaggcacttgggg

SEQ ID NO: 14 - DNA, 4001 bp, Homo Sapiens
gtctgggtgtgaggattttaaaggttctccaggtggccaggcatggtggcttatgcctgtaatcccagcacattgggaggctgagacaggaggattgtttgagtgcaggagtttgagaccagcctgggcaacatggtaagaccctatctctatgaaaaaaaatttaaaaattagccctgtacggtggtgcacacctgtagtcccagctatttgggaggctgaggtgggaggatcacttgagtgcaggaggttgaggctgcagtgagtcgtgattgtgccgctgtaccccagcctaggcaacagagagagaccctgtctcaaaagaaaaaaattaaaaagaaagctccccagattattttaatgtgcagccatgattgagaactactgctagctgctaacagtgcttggtagatttgattggggggaggaggagggagaaaatataggaatttaataaagttgtagaatatatgactttgcctcttttagtacccctctttggtcctgcccaactttttcctccttatttttattacttacacctcacaaaagccattagccacttgtcattcagtctcagctttttctgattttcttttggaaatatgtttatttcttcttctgttagcattttgtgtgctttgacgaacaaaatgtctataattatataaagggatacaattacaattaaatagttataattttaaaactctcctaattcttcaaacctactcttgaaaagtgtcctggtgacctttttttaattcaggcatttgtaaaagtttgagactgcagattgaatcactgctaataaacatcatacttaaaaaaaattgatagattgtgttccctgtacttcctgcaacacccaccagaactgccactgaaacatattctttaaatttatgcttttggaattggaataatttctgttacatcctgctttgattctataacacctgctgctgttcacaattcagactttctgaaaccccgccgtttgtccttcactgttcccggaagtgaatgagaggaactctaagagctggatttggcaggatgggacatggtgaagagtcctatgaagaatgactctttaaagggcccagcttttcttgctatgctacttttgtagctgttgattaaatagaaattttggaacaatttttttgccttattggccatggatattgaaacgaaaaagtgctctacttctgtgtcttactaatttcatcctttccacataatggtttcaggcaaatcacgtagtgtttgtccccactatttctttcttttttttttttttggaggaggggaggtcaggttttaatgtcccagtcctcgggcgccgtcatcccgcgcctgccaggcccggcggccatgtcgctcactcgggtggcggccagcctgcctcatcagggccttccgcggaggccgccccgtcgccctcgagcaccagcttcacgtccagctccagctgcccggtgtagaagcccacggcggcgcacacccagagcgggctggtggcgagtacagcgcccgcagctgcgccccctagcgtcagctgcatgggcccccgcagcgctgccaggccccgcaggcgctgccccacaccgcacacaggccgcccagcaggaagaagccatatgctgcttcgtgatccatgtcactctgcatgaaggagataaccccgatgccctatgccaggaggccattgtggaaccaggagaagaaagctgtctcgtgcgcctttcggagaggagcctggcgcctgcacggtccagctcggacacaggtggcggcgaagccccgttgtgggggccgtggccgggggcgaaggacccctgggcgcccccgctccggggccactgaggcagcagtagcgacctccggaagcggagactgtccccactgtttctatgctggtaaatgagatctggttgaaaggaacgacaggaacagtcttgaaggtggaggaaagtcttttgaggcagtatggtagatgagctggaggatgtagatggaaagttgagatgggagtagtcaacctctttttcatggacttagtgttttttttccgtttcttttaaacaatattagggttgttactttcttttttattttggttccggcttcttgcagataggtgagcctggagaccaggccttaaaatagtggttacagtccctgacagtttacagtgcggagcctaagcagtcattcaagattgtacctttggaaatgactccattgtgtaccattcttggtttcaagattattcttgtttgattgaatagcaagggccttaaagcccactgatttattaaagtactgattaaagtagtgattctcaacattgggtgtgcgttagagtcacttggtggagctcttaaaggtataaatatgagttctctttgacattatgatttatttggcccagagtggagcctgtactttgctatatttagtatttctcaggtaatattagtgtgtggccagggctgagaacctttgcattcaagagtcaggagacacagtgctaagcccaactttgtcactgactctgtgaactttgagcctcatttcttaatctgtaaagccgagcgtgggtaaatgaggtaatacgcgcctgctccctacctacgtttatgttctcctccagactttaacattctgatggaagatcatccttcatatactgttctctccccattgtagctagatataatgagatttggtttttcccactcttgtggttcttgaagatctggattgcaccttcctctctggccataatttaaaagatttttaaaacttactgatggcttccttgtcagtgagtcaggtaatattctagggctttgaattttatatattctataattttaaaatcttattttagttgctgccctgctatcctggtattggttattacatagtgtagtattctgctctaagtctgtggtactggaaccttaccagtttgctctcatctcttgcaggagaaatatttgaactaaaagctgaactcaacaatgaaaagaaagaaaagagaaaggaggctgtgaagaaagtgattgctgctatgaccgtggggaaggatgttaggtaagagtaatcacccttgccattgatcacttcagaggtccataccccatcttatggcctttactgcttttcctttaaaagtatcataatcatagaacctctaagaatgggtttgtcccactaaaaacatcattaggaagtgcagttgcctttgtattaatgctctactttttgtttgtttgtttgttatggggtgtgtgtgtgtttgtgttagaacagtgaaacgagtttgatttcattgcattcagatctagcataacacctcctgagagctggcacagttacaaatctttttgctgaggtcgttttagaagatgataaaaatacactgagaagcataagttcacatgatctttaactggctcaagccactgccctcaactttacaactgtacattcaattgctggattcaagatgaaaatcaatgttaaccaaatccatgtagtcttattttttatttctgtaattaagaccatttggaaataagtaaggactatatgcaggcccctaaggattatcctaagaccctttcggggggtccgtgaggtcaaagctgttttcataataatacttagatgttacttgcctttttcactatttggatgtttacagtgatggtgcaaagcagtggtgggtaaaactgctggtgcctcagcatgaatgaaggcagtggtgccaaccataatggtagtcattgtattccttaacaccatgtgctaaaaaagagcagtttcacttaggaatgtccttcatgagcagtaaaaatttgttttattaaaacttgaacctttttaatattgtgtttgatgaaatagggattacccataaatctcttctgctgcgtagcagtgcaatggtcgacttgagaaaaaacccttgtgcagttgtttga

SEQ ID NO: 15 - DNA, 4001 bp, Homo Sapiens
tttgtgtaagtacactttatgattgcacaatgacaaaatcgtctaacaacacatttcgcagagcatatccccattgttaagcatgggaactgtataatgcctttattatatatacatgactatataataagggctatatgataagccagagttaccatggcaccacaaaatgttttttaaaaaatcagccaagtggcagggtgcggtggctcacgcctgtaatctcagcactttgggcgtggtggcacacgcctgtagtcctagctacttggaaggctgaggcaggggaatcgcttgaacccgggaggcagaggttgcagtgagtggtggtcgcaccactgcactccagcctggtgacaaagtaagactccatctcaaaaaaaaaaaaaaaaaaaattagccaagtgtgatggtacattcctgttagtcccagctactcaggaggctgaagtgggaggattgcatgagtccagcagttcaaggctgcagttagctgtgattgcaccactatactccagcctagacaatagtgcaagacccggttgtggggcggggttaatatatatatatatatatatacacacacacacacaacatagaatttaccattttaaccagttttaagtgtacagttcagtggcgttaagcacgttcacagtgttgtgcaaccatcaccaccatccatatccagaatttttcatcttctcaaactaaaactccccacctattaaatactaactccccattcctcccttactcactggcaaccaccattttactttctgtctctatgagttccgttattccaggtacctcatacagtatttgtccttttttttttttttttttggagacagagtcttgctctattgcccaggctggagtgcagtggcacaatctcagctcactgcaaccttcccctcctaggttcaagcaattctcctgcctcagcctcccgagtagctgggactacaggcccgtgccaccacgcccggctaattttttgtatttttagtagaagcgggttttcaccaggttagccgggatggtctcgatctcctgacctcatgatccactggcctcagcctcccaaagtgctgggattatacaggcatgagccaccacacccggccttgtcctttttttttttctttttttttgagagaggtgccactctgtcgcccaggctggagtgcagtgccacaatcatggctcagttcagcctcaacctcctggactcgagcgattctcccacctcagcctcctgagtagctggggcgacaggcatacatctgcacgcccgggctaatttgtgtgtgtgtgtatctttggtagaggtggggtttctttcttccttctcctccttctccttccccttctcttttttttttttttttttttttgagacagagtctcactcttgtcgcctaggctggagtgccgtggcatgatttcggctcactgcaacctccgcctttcaggttcaagcaactctgcctcagcctcctgagtagctgggattacaggcgtgagccacagcacctggcaaatttttatatttttagtagagacggggtatcgccatgttggccatgctggtcttgaactcctgacctcgggtgatctgcctgcctcggcctcccagagtgctgggtttacaggcgtgagccaccacgctcggcaagatggagtttcgccatgttggccaggttggactcgaactcgaactcagtggttccgaacaacttggcctcccaaagcgctgggattacaggcatgaaccaccgcaccccagcccagcatttgtcccttggtggactgctttatttcacttagcataacgtcctcaaggttcatctatgttgcagcaggtgtcagaattcccttccttttaaaggctgaataacattgtggtatacaccccattttgtttatccgttcatctgttggtgtgtattcaggctgtttctgccttcgggctgttgtgaagaatgccgctatcaacatgggtgtgagaatatctgttcaagtccctggctatatttaaattcttttggatatttagccagaagtggaattactggatcatctggtaattctatttttgattttttgaggaaccaccaatactatttttcacagcagccgcagcattttacactcccaccagcaatgcacaagggttccatgaaatcactaattttataacatttttcctgattacatgttcactgtagaacatttagaaaatgcaagaaataaaatttagaaaattaaaattccccttattctacataccgggacatgacttgaatttttattatccccaacaaagggaagagagcatttttttgggacgattgcgttgctatagtgccgaggcctgccctgcccggaccttattctcaaagccccgccgatcccgccgtccccgcgaccccaagcgtcagcaaagtttatgcagttgaactggattctgagtatatctgtggatagttcctgggagagtcgcagatacgacacggggttgtcacattctctatgggtctgtttcctcatctttaaaagccatctctgcgttgctaaggcaaagcataaaatgtttgaggaaagcgacttttctagaaagcacgttctacaaacacaccatccacgttccaaactgagcttcggtgttttgactggagggcacctgaggacgtcagtacggtcccgcaaagaccagcaaccagattggcaagcagggggcaggagaatttcccgccccatctctttagttgtctattggttgattttaccatcagtctcccctgtcctcctatcatcgccgctatatttgtgtctcggtgcatactctcattggccctacctgcagtcgctctacgtaaggggcgttccagagtcagccactgggagtcgctggattcgggttttaaaaaacgccggccgtgaagtgggcggagcgagcgatttgaacgcgagcggcgcggacttctgccaagcaccggctcatgtgaggctcgcggcacagcgttctctgggctccccagaagccagcctttcgctcccggacccggcagcccgagcaggagccgtgggaccgggcgccagcaccctctgcggcgtgtcatgggcccgcgccgccggagccgaaagcccgaggccccgaggaggcgcagcccgagcccgaccccgacccccggcccctcccggcggggcccctccttaggtaaccggccgcggccccatctcgaagaggagaaaaccgaggctcgcaggcggagcccggatctcccgagtcccgatcccgtggcacttccctgttgggggacaacgcggttccgccgtccggcatccgctccgggcacgggcggtgccagccctgcgaggggctggagcaggcggttccgaaagcgggaagggaccggcttagccacttggctcctaacgccgtcttcttgttaggactagtggttacccagcgcccaccgcccaccgccaaccaggcattgcctcccactgttcgtgcgttatctcagcttcatattgtgcccattttacagctaatgagaaagccgaggcacaggccagagagcttgagcagagtcacacaacttggtgttctggcggacacgggatttccaatcctctgtgtttgtgcatttttaaattgcaaaagtattgactgctttcggtgacgatttcaaacaggagtcctcttaggaggtgtctttcaggggttttttttcccttccgggagaggctgttaggccttgaaccgaggccctctgcgctgctcactctgttgccttccagagcttgtgtccgggaaaaggggccgaagtctgtgtcttaattgtctatggtgggctggtggatgggagacccaacggcaggaggaggcagatgcctgtatggtacatggtggcaacagctgctttacttatctcttaactcttgctacgtagctatgaggaagatgggaagtgtattgtagttta

SEQ ID NO: 16 - DNA, 2501 bp, Homo Sapiens
ttagcaaaagcagtttcagtgagtgatcgtgaaagctaggcttgagtgggtttaagagtgagtgggaggagaggagttggaaacaagtaataataactaataaccaactcgctcatgggattttgctgtaaagggaaatagagaaattgggtggtagctggaggagaaagtacagatgaaaattttgtaagatgggagaaataacatgtatgttccagtggaaaaggggaaaattgatggtggggggcggtggagaattgctaaagcaattcaagtctcagagggacaccagtgtgttttgggttggctgtctagaagggcaagcacagtatatggggacataagcttggaggtggggagatgtgacaagtggggtcttggagttctttaattttcccattgaagtaaaggatatactaatagtacctatcatgttagattgccttgaaaataagtgtgttcctttaaagcactttaaatagttgctggcacatattgggtactcaaatgatagcaatgatagcaattactagctatcactgcttcccaaataccaatctgtggaacaacatgtgttcattagtttattctagtacaaatgaaaatgggaaaaagaaggataatataggtatgtttcaaaacaaatatattttagtctgagattaagcccttccaccttttaaaatgggttttctcctatgaaaagtagtggtactaaatggcaggggtttttttcttcttttagtaatattgcattgaagaattgtgtacatacattcatatatatacacacacattcacaagtaagtgtgcagctcagtgactcatcataaggtgagcatacctatgcactaccacccggatcaggaaatagaacattagtagcatctggttggattttgggttttttttttccccctccctcaagtgttcttagctcgcagaatagaagaatggccatccctgtgttgggatcaaggatttttttttttaatttcctggcctgtgaaacccaaaagtctggtaatatgtttaacactgaggagtccaataaaccttactaggccatacttctgctggaggaaagaataaaaattaattcccaaatgtactataagtttccagagccatgagaacatttctaaactgacgtgacattgattcctcaagcattcttcaagtcatttgcctgaatgaatgattttattcttatgttatgaaacccataatactttttaaaggatttcagattcttgaagacaaaatgcctcttgccctcttgagttaactaaaagtgtactgagatttgtcatttatccatttttattgtctttgtcccaaagaaagtaggcctattttttccccttaaaatatctttccaatctagtttccttatgatgatattaggcgggtaatactatgaccaatttctaagacaaagtgttggtcacttattcaatttctagtacttagtgacctgagttgttttcctaggacataatccacaaaacaagattgaagaatacagagctggcatgtgtacttttacattcttgggtttcaagcttttgcctattattttgtgtggttttctgcagcatgtgtacacaccctctgtgattatgctaattatttatcagctgaaaattagtgtttggggacaactgcctctttttaattgagggcacttttctctgcggctggcactcacacccagcatatgctttacttgtttcatgatcctgttgatgttagggtttagttttctgggcaatctgcctagtttgattttgttttttacttactggttgcagtgttctgattgtttagcacagccattttctaggaccgatagaaacctctttgccctctcttcagcagcatttgctttatctttcttgtgctgtgtttaataaagagcactagtcctccacccccagggacacctgtgacctcttttttacacttaacaagcaaatcagggagaaaatatatgtgtttttggaagtttattatatgaagatggtatacaaaatacattcatcatgactagaaatataggaccaaaccatgtctgtcttatatctgtagcatatattcttggtttgtataaaagtaactttaaaattccagtttccttaaatagttatgcacaaaacacacatacacccacacacacacacacacacacacacacacacacacatacagttacaccactgtcggccaaagatgcactcctcctttaatcaatttaaatgaggctagcgagtatctgtttgatgtttgcattcttgtgggctaggaaacaaggcacgggtccctaaaattaacatctcggtgtcacttcttggactgacaagacacagacttgcacatggtttcagccccattccacccagactgttccacgtacattatctcagaaactctgaaaggaagtgctcgttctttgttagtgccaaccatttttgtcataaatggcaaatgattggaatatt

SEQ ID NO: 17 - DNA, 4001 bp, Homo Sapiens
ccagcccagtgtccccaacctgctctcctgattccccagccttggagccagggagcacatacatcccaaagcacaaatcacacatccttggacagagcagcttctctgcccaccactggggacagaaggggcgcctggctgtacctcagattttcaaacgtggaattgagaagaacagtcatgacaacagaggacacctcccactgggttggacactgccttctgaaaggagcatgttggcttcctgctggaatgatggtgctggtagggagaaccctgggtccccaggcagtgggctgagggctttggacacctttccacacctaaggggctgtcaggtcgtcagcagggacaagggagcagccacagggtctccatcctccatgcgctcatggttcgtgtgcatattacacatatcatgtacatgtcatctttaagcagatgttctgcccactgtgtgctggagtgggagggtcatctcaaggcttccattctcagatgtaattttcagcctcactgggattgggctgagtgactgtttaatcactgccctcttggcagagatgtttctagggcgttccctggtgcacttctcatcggtggctgcctggtgaagcgggaaagttcctcagcctctccattgattccttccctccctccctccttccaccaaccagtgcttactgaacacccactgtgcactgggcactgctctgttcccagtggggaacgaggccaggacgggccctcctcacccgcactctggctgggggtaggggcgacggcagcacacaaggtcatgtaggtcacacattagctgagggctgctatggaggaggaggacagagggcaaggtgacgctcacagcgacaagcacagcagggcagtgactgctactggctgtcactctctgaggaccaggcttgtgctggacgctttactcttcacagatacctgtggccagtgagggacaggctctgagatgggagtaagtcgccagaggccacacaacctgggagaggcaagcaaggcatgaaggatgagaccaccctgagagtggtgggggtaatatcagggtctgaccaagggaaagaggcggcattagagcctctggctgtcagaggctggcagggctagggagcaggtgtgagaggccaccaccactgccaggagagaccagaacctctgcccagggagaggacagcccaccaggggcctgcttcaaagcaggatcgccaggactagtggtcaaggtctgtgaggggcaagggacagtgaggggcacggatggctgctgggaggatgaagtgccatttgctgagggtttagcaggttgagtttcagatgctggtcacacccaggagttgagggtggggccttggctgttggggtctctctgcctcgggccttcccaccccagggcctgtcacagagttgatgggtggtattaaaggggcgaatgctgcctgtggcaggatggggaggctgcgtgggtctccggacagggacataggtcagggaaggagcaagaggggtgcgtgtgagttgggtggggcctggtgccaccctgggctcacagccggggaagaagcctgagctttgagctgcccctcgtgtggggaggcctggcctaagcacccggcaaagtcacaggggcatcctagggtgtgcccctccctgctggcaggaaaggtggatggggaggccctgactcgcggggttggtgaaagattctgcctgaggcctctaggccaccctgccttgccctggcctcggtgattactactacccttgggagccactgtgacatctggtctcccaggtggatttccccgcagcaccacgtgcagcccccagctccttggtctcagcccaagcccccctctacctccttctgcaggagtgaggcagcccctgcccactgtgcttaggcacctcacggtgctcccacagcctgaagcctccaccttgctctggtccctgcctatctgctggctcctgggctggcccatcagagtgccctcaagggaaagcaggggccaggtctccctcctggtgcttttcctccctgtgatcagaagtgacccagctcctgcgggggtaatgagagtcagggaggcgctcagttatcccagggctgggccgaggcctggccacccgtgtaaaacagggcaaggctgagctctatcagtgctgtctgggagaagggccccagggggcatcacaacagggtgaccttattgaatcctaactggatgcggtagaagtgagtccagcatgggggctgggtgggcagaggcctcgcacacaccctcctctccctcatgcacctggcttcaggtggactgtccaggcaacagcagacatatgtgttacaccatggtgtgggccctacagcgccccatggaggagagggggttggatggattgttgccggctcattttccaaggccagtctctgctgctttgctttcagaagagctccctttcactgtccagcctgaggtggggctgcggggaggaggctcacgcttttctctgtgtttggcaggtgaagggctggatgcacagtgggagccggaggcggggggctgcagggagcacaccagcgaccggccctccaaccctccagccactcagcaacatcgccacagcaaccagcaaccagacggcagcagccgaggcaaacacaagcggacggcttcccaccgtcgccgaggacagggaatgactacggcaaatcaggccactttgccaactagggaggtggagtgtcactagtggggaggggcggccaccgcccgctgcacagagcgccatgccggctggagaagaggcgctggggcaggggctgcagtgtggctcggcctcacccccctgctggcactgagtgcctccagggcagctgggctcttgtctgcctggtctcagtgtcccctgtggcaagagggagaggtgccccatcccgtgctccttgtctgggcccgctgctgccagaccatgggatgtcggcaaagctcagaggaaaaagaagcagcccggcggtcccggagaattgaccgccacctgcgctcagagagccagcggcaacgccgcgaaatcaagctgctcctgctgggcaccagcaactcaggcaagagcaccatcgtcaaacagatgaagatcatccacagcggcggcttcaacctggaggcctgcaaggagtacaagcccctcatcatctacaatgccatcgactcgctgacccgcatcatccgggccctggccgccctcaggatcgacttccacaaccccgaccgcgcctacgacgctgtgcagctctttgcgctgacgggccccgctgagagcaagggcgagatcacacccgagctgctgggtgtcatgcgacggctctgggccgacccaggggcacaggcctgcttcagccgctccagcgagtaccacctggaggacaacgcggcctactacctgaacgacctggagcgcatcgccgcagctgactatatccccactgtcgaggacatcctgcgctcccgggacatgaccacgggcattgtggagaacaagttcaccttcaaggagctcaccttcaagatggtggacgtgggggggcagaggtcagagcgcaaaaagtggatccactgcttcgagggcgtcacagccatcatcttctgtgtggagctcagcggctacgacctgaaactctacgaggataaccagacagtaagtggggccgggggttttcctctgcttgttcctgctgtcgtgggttcctggaagcaagaggactcgtgaggtccaggacagtctgcagccagaaagggaaccaggcgcaggcctggccctgctgcacgataactgaggcagctccagcaaggtgggggcagagggaacagggtgtggagtgcaggtgtcatgtcccatgcctgaagtactcagggtgtggaggccacagggcaagagagtgtgaggctccgccgggcatccatgatcaatccatg

SEQ ID NO: 18 - DNA, 4001 bp, Homo Sapiens
ttgagactgggttatgagactggctaagactggccaattttggtattttgggtagagacagtttcactttcttgaaaccctggtctggttggaactctgggctctaagtgctaggatcccaaagggctgggattacaggcattagcactgtggctggcccagaatgaatttttaactgaagagttggaaaaactaaatgactgttaactttaacttctaaacattacaggaatggaagttggatacactttgtgacttgtacgagacactgaccattacacaggctgttatttttctcaatacgaggcgcaaggtggactggctgactgagaagatgcatgccagagacttcacagtttctgctctggtaagaggtgttctaaaatgtctggatttccactaaagcaggattcagactacaatatagctgctaagtgctgtgttgtcgttccccctgcttaaaataaagttgtttcttaactatacctgtctgctattctcctgtagcagccagggacgcttggtctcatacatgttgattaaaattaaataccgacctgactggtgattcttgaattaaggtttattaatttgcagcatggtgacatggaccagaaggagagagatgttatcatgagggaattccggtcagggtcaagtcgtgttctgatcactactgacttgttggtaagtctcttaatgctttttaaaaatctaccaaaagttagctttttggggggcaggtttttaagtaacctttgccaacttgggctatttggaagagtaaaagaccacactccacagtgggctataccacttagtatagttcgctactattttgtggcctacatgacaggtgtcaagtttttttgaatcaatttttaaaacatgccattgtgtttcaggctcgcgggattgatgtgcaacaagtgtctttggttataaattatgatctacctaccaatcgtgaaaactatattcacaggtgagaagccagcatcttggctgtattgaaaaaaattcatacgtttttctactgtgatttgtatgaaaggtaacatcaaatcaaggaatagattcagtaaagtcagtagtgttcagtaagatgatgtaattaaatttgtactagggaaggttgatgagaacaaagtgggaaaacttgtaaacattgcccagattgtggacatagggtttttttccacaattgttggtcttaccttatgcttgagcttttagtgatgttcttgtgtccatgtgtttttcttggtgattttttctatagttgggattttcttggtgtcgcctggtagcaatttgagtgaaccctggtttagttatagtggctttatccctaaataaattgaattgtactttgttatatgatgtaaaaaaagactttttaaaaaatacaggagtcgatagcagcagttggtgacgagatggcactcagaaacggcgttgacgtaatttaggacgtggaatcataagcgaaacagcacactgtttgaataaagagcgagtcggtatttatatttgtttttcttttgtcatgattatttgatttttaagttgctccagctaaggcatttttttgtattagtatttctattagggaacctttcttattaggtggtttgtattgtctggtttctaacatgcaggtagctgtttggcagttaaacacgtttagagtaatttgagttacaacgtgtgaaactgagcaaaaaagcagtgataagtttgggttaccataccaaatatttgttttcccactggaaaaaagtaagttttagaaaatagttaacctttgcagcatttgtttacagtttacagttccagaagtgcgtcgaaatggattacataactgctcttttattcctggtgttcacatctgtcccaggctgacacctgctcttggctggcccactttggtatgggctttaatttcactaccccaaacacgatactgtcatctgctttataataatgctcaagatgcctgataaaaatctcattttgcagccagacaagccttgaatccttttggcactaactgcaaaggaagatttttttctctagatatgcattagcagctagtgctccagttagaagcacgaactataaccttgataagtaaacagcagctggtggttaacaagtggatcgtcatgttcagtagtttatacattatgtgagaagtaacgttctgattctttttcttacacagaattggcagagggggtcgatttgggaggaaaggtgtggctataaactttgttactgaagaagacaagaggattcttcgtgacattgagactttctacaatactacagtggaggagatgcccatgaatgtggctgaccttatttaattcctgggatgagagttttggatgcagtgctcgctgttgctgaataggcgatcacaacgtgcattgtgcttctttctttgggaatatttgaatcttgtctcaatgctcataacggatcagaaatacagattttgatagcaaagcgacgttagtcgtgagctcttgtgaggaaagtcattggctttatcctctttagagttagactgttggggtgggtataaaagatggggtctgtaaaatctttctttcttagaaatttatttcctagttctgtagaaatggttgtattagatgttctctatcatttaataatatacttgtggactaaaagatataagtgctgtataaaatcagccaattatgttaaactagcatatctgcctttattgtgtttgtcattagcctgagtagaaaggcctttaaaatttttttagaaagcatttgaatgcattttgtttggtattgtatttattcaataaagtatttaattagtgctaagtgtgaactggaccctgttgctaagccccagcaagcaatcctaggtagggtttaatccccagtaaaattgccatattgcacatgtcttaatgaagtttgaatgttaaataaattgtatattcactttaaaggtgcttttggtcattttatttttattacaacttcattatttacaaaaccccccatccagatatattcacgttaacaattctgagataactgctgcatcacagttgcacaaaggctgatgagttgcaaatgttcatcagcaccatctgctaggcatttgtcaacttcctacgagaaaaatttaagaaattagcatccttcaggtagttaaatgttccattgacatgtgcaaagtacctacttacggcaagtttttctgtgataatagacttctgtttatcagataagttattttctacaaccacatcatggagttgattgacgagctgagttgctgcatgaccctcatctattaaatcctataataaaaaaaacttttggtatgatgacttaatattcctttccccaaagttagtaagctgactttaccttgaccacagcttctagtttgtcaaaagagccactctgacaggcagcaaatactccatcaattttctcagctggtattacctaggtaattgaatgttcggtattaaagatgtttctaggtgagactagacatacactctgccaactggcccccgtgcccccagtcatttctgttccacacctaagttccatactttcctgggaaggctttgggagaacggaaagggccagagtaactccagtcaccactaagcaaccaaggtgctaacaactgtgcttttaaagccctttaatggctttgtgaacttccaagtttgggcacacatggattatagcttgttctggtcagtggatgaagattaagttttcccctagcggctataacgattcctcagaacagtggccaagatcaatcaaaaagactgatttctttaaaggggaagtgccctttctctcaatgtctccatgtaaagatgccactaatgagattggtttaaaaagtccacaatatccagaaaattaaagaggattagtggtaccagtcttgtcatatggaaggcctaccgtgaaggt

SEQ ID NO: 19 - DNA, 4001 bp, Homo Sapiens
tcctccatagtcccctgatgaggtgtagaattgggaaataaggggtttgggaggactcaccacgtgaatcttgtgacaagggaaaaaagtatgagcccagtaaaagaagttttagactataatgcttgaaattgccctaggtaaccaatcagaatgaagtcttccagctaatttcttactgcacttaccatatgctgatcaggtgctaagacaccagatctctcccttcatgtgtccaagtgctttcaagtcatttttattgggactggacttcacttggcaataaaccagacagatgctatgagccctcctccaacagaggtgatatttccaatgtcactctttaccctcccccaaaacaagcgtcgatttttgaagacagtgattcaagtttctgtagcacctgtcagtgatgtgtagaataggggggctgacttcagacccctgtccgtatttgtgtctgctgcctaacctacaagtagagctctgaagaaaaagaccatttggaattgcaccacgttctgttttctttggaataatccaggaaatgtatctagctgccttggttcattaggatgaaccacaggccaatgttttagcaatgtgctgtgaagttggataaaagggggtttcatctggggccaaaaaaattatttcccttttctatattgaagcctcaagtaaggacgagtgatgtcgggtgtaatgcaccacttctcaaaatgtgttaatagttttgaggcaacctggaccctactgcagtcctaaaggtacctctagagctgcagcctgaaactgtacattttaaataaacccttgggggttatcatgcccagtgaatttgagaatggccctcaggtgaatagactgatgctgggacagcagcagcccgtggctgatgtgctgagcttactgcatcccctctctgtgcccccgggctccctggagcaagatggagtataatcccgccagccaggattttaggacagggacatagccctccgaacgatggtggaagtcagtgggtgccacatgggatgaagactgagagggaaacccttagaattggctgggcgtggacaaagcggggaaaaaagtactgaccaaactcacttcagtcttggagaactcaaggaacaagggacacacatacgtacacacacacacaggcatgaacacatcagacacatccttcagcctgcatactttagcttcagatagacttttcttttactagaggcaaagtgatctcactagaagaatgtgtttctcaggagctgctagatggcctgtcgctctgtgcccgctcactgtggacggctgccccacgtggatgtccataccacagtgggatccacggcctcactcaaaagagagctatggttcccagatccctgacaagagggccacaatctgaaaaggggttcctggttagctcttttaggcttagcctgagaacagaattagcctcatatttttaggccatttgccatacacattttctctcattctcaactgatacgggtggggggagattttcgaaaacagtgatgttggtaatttatagttagtaaataaaccatgtttccatatgcaaggattcacaccaggggatcctgcccacaggtatctggaggtcaaattcgtatgtgctttctgccaatctgagccactgcctctgtgtctctgagaataatatactctgcaagaaggaaagacgcacaagcaatagtgcagtcttcttagcaggcggaagtcagcacggtgtgccccctgtgtaaggggagttgcgctaagcaatgtgtttggtgattgacagattctctgccccagattctggttacctctgattagtagatgcggacatggaattaagggtaattgaaggatatttatcgagtcagacatacaccttagaataaggcttttactgttctagaaacaatattccagaagatgaaatcatccaggatgccccaaaaatatttatttatacaaagattttgagagtaatattcatacttgtctttatacctcagtctatgcgtctggggccaagtcactgtgtggcacatgtgcagcttccccgaatgcctcacatgttgtagcacctgcttccaggaacaccaaatgaacacagggtcttggaggggaagtgggggaagaacccataatgccccaaggctgcatggaaccacaatccagaaatgtgcatcctgacctggaaggcgtctaaccaagtgtccaaggggaaatatgatcgagggagaggtgagaggagggacccagagggcagacaggagagggttgatttccaccctttcttctgcgttcagcatatccaaaaggcccaatacagttgatgggccaggaactgcatgacctggattttctccctgtagtgacccacgatgttaattgatgtagaggacagtttgcaaaagtaatagatttgcccttaatcccagacagtatgagatacaattctgggactttgtcttcgtaacctgtctttaaaaaaaaaaaaaaaatgcttgccttgtataacataatccagattccctagagcagatgtggtacagcaatgagcaaatccaacctcagatctgaagtgtcttccagtctggccctgacccagccattctctgcccttccttctccctttagggtagcccaaatcccattgccacacaacatctcaacttaccatccctttcctctatccccatcccctctgtctgcgtcacagaaagtctgtgtgttctgaagagttcagccttcctctaaccaaacccacactttctttaccaccgtgattctcagagccagcaagaaagaaatgttccaaaaggaaacctccatctcagccatttgcccggagccgaaggttgtgggctccaggcctctcagtgaggtttgttgcttgtgtgtttcccgaggagcgggcagtcaggcagtggtggttctctctcccctctctctgtcgcacgtggggtctcagctacatttacaagacttcaccaccatgttggagagctgctccactttgggggtcctcccaacatagtacaggatggtcaggggctccaggtcctggggcacgcagcaaggcgaggcagatgcttcagggttcagagtgttgtacagtcccagcacctgggaagggacatgtcagtgagaggttggaaggccaagtctcaggcctggaacccaggaagtcgcccagttccaggggcagtcccagaagctgagcaagtgctagaatggccacgggtgctctttaagaggaactgttgggggccgggtgcagtggctcacagctgtagtcccaggacttgggaggcagaggcaggcagatcacttcaggtcaggagtttgagaccagcctggccagcatggtgaaaccccatctctactaaaaatacaaaaaaattagctggctgtggtggcaggcgcctgtaatcccagctacttgggaggctgaggtgggaggatcacctgaatccaggaagcagaggttgcagtaagcagaaatagtgccaccgcactccagcctgagccacagagtgagtctgtctcaaaaaaaagaaaaaaaaaaaaactgttggaacctggtttgggtgagtgagtagttgtgtagttgctgttcatccacaatgacagaagcagaacaactgcacttgtttggggtgatgagttgaagcatatgacagttactacactgataacgaattatcttggctttttttttttttttttttttttttttttgagtcagagtctcactctttcacccaggctgaagtgcagtggtgcaatcttggctcactgcaacttccgcctcctgggttcaagcgattctcctgcctcagcctcccaagtagctgggattacaagcgcgtgccaccacacccggctaattttttacatttttggtagagacagggtttcaccatgttggccaggctggtctcgaactcctgaccttgtgatccacccgc

SEQ ID NO: 20 - DNA, 3601 bp, Homo Sapiens
  unsure (3319): unknown base
cctcttatgtgaattatctgttaatattcttagcctagttttgttggattgtttgtccctctcttaacaattggaaggggctctttattttaggattatatccttgacctattatgaatattacctctcagtctatgttttttaaaaacttgtataaatataccttagctacattgggtaatattttaaaagtagtttgtgattaggagtaccaaatattcaattttactataaaattaaccaatcagaacaatatgatataataatataggaataggtaaccatagcagaatagattaggaacagatataagtatatttgggatcttaaaatatgacgaagggacatttcatttgaattgaggagaaagaatggattatttaactgttactttagacttttagtcttatagactctgtctataagaaaatagtcttcacactttaatcaaaagtaaattgtcaggatagggtcagttcaacgttagggtaccccgacgtggtggctcacgcctgtaatcccagcactttgggacgtccaggtcaggagatcaagaccatcctgggcaacgtggtgaaaccccgtctctactaaaaatacaaaaattagctgggtgtggtggtgcgtgcctgtaatcccagctacttgggaagctgaggcatgagaatcacttgaacccaggaggcaggggttgcagtgaaccaagattgcgccactgcactccagcctggcgacagagcaagactctgtctcaaaacaaacaaacaaacaaaaacgttgggcctagtaaatacagcaagtaggccaaagacacaggattttaaatatattctgcttccctaattttcaaggctttaaatatgcgaaattagtttctttggtttaacacacatttcctatgtttgtaattttaacatatagtaataaaaggaatttgaattttttcaagactctttaaatcttaatgtcaactcagtaatatccctgaaacaatatcttcattctgtaataaaaccttaatttcaaggcattcatgtgtcttgtactcactagccttcatgctaagtgctacattatcattattgtagttaggtagatgagaaaatgaaatgtcacagagattaatttttcaacatccacttacaacatggagtcagtatttgaatacaggtttctctgactacaaaacccatttttccactatgtctagttttctccctcacttaaaaataatatataatgtacacacaaatacacatgtatatgtaatacatgcttataaagcaatgtagaacataaagttataacatcagctgtaatctaacaacctacagaatctcagtgaacagtttgatgtactcttctcatcgtttctttacaccacatacatacccataaggatccatatctaaaattagttggcttctgtttattatatacacctgagaaaagcccattctgatatttttacagtattagaaatgggaagagacacatatggtgataattactatattctacgtagtagtggtttctaaatgctgatctataggctgatgctggttctaataaagttcttactgatccaaggtgaaataaggaaaacataatgataatatgaatttctttcaatgtagggactatcctgtattccaagttttttctttcattgtttttttgggggagggggtggattcaaatgttcattcttctaaaatcttggaaagctgtgttccattgttgtaggtgaagatgataataatgatgatattagctctttgcaaaatacaacaatggtaaccctgtgttgttctctgccccagtctttaaaaattttgttttactgctgtatgaaatttagaagttttgtaatgactgctgatcatcatcttacacagtttcttgttaattagcagcatatgtaattaactgcataaatatttgacccagtcctgttgaccttgggatacagtatattgatttttcacccttattagtttactgagtacattttatttttttcattcacagtacctggttatggattattatgttggtggggatttgcttactctactcagcaaatttgaagatagattgcctgaagatatggctagattttacttggctgagatggtgatagcaattgactcagttcatcagctacattatgtacacaggtaaaacagtccttcattgtacctggctgtgagttaccatgtaatatctagcaacagaggcctatttcttgccagatttattaattatggtcttggatacatttatcgtcaaccaaaaaaaattattttgagatgattttggttgttttgctttgttgttgttattatttgtcagcattacagaaccgatgtgcctgcttatacatacatgtacatgtatagtatctaaaagttgtcactcctagaataatagacattggagactaggaaaggtgggaggaggtgagggatgagaaattacctatgggtacagggtacactattcaagtgatgggtacactatattgcataactcacaaccacacaatatgtccatgtaacaaagctgcacttgtaccccctaaatctatgaaaaaaaaagttctcggccggtcacggttgctcacgcttgtaatcccagcactttgggaggtcaaggcgggcagattacgaggtcaggagatcgagaccacggtgaaactccgtctctactaaaaatacaaaaaaaaattagccgggcgtggtggcgggcacctgtagtcccagctactcggagaggctgaggcaggagaatggcgtgaacccgggaggcggagcttgcagtgagccgagatcccgccactgcactccagcctgggtgacagagcgagactctgtctccaaaaaaaaaaaaaaaaaaaaaagttctcacttccagtcagcatttctagaaatcacttcttaaaaaaccactcttgtttaaatgtacatatgaattccatctcaaaaggagtatgcattggtcagtttccttatagttgagtcttacatatttaaattagctggaattctagaccataagtcataggttcatttgctaaataagtcctgtattatatattttatgtttctcaagaaaatactttcaaggattgtatgtgtcaaaagagattttttttgtatgaaagtgataattttgatgttcatggagtaattataaactattaatactttatatttaaaaattttaaaaataccagcatgaatttggaaggacacacaaaaaataagaaataaattaaggatatattggatgatttaaaagtaccctcacattttanagaggaaagtaggaaacagcagaacgttgttggtgaattaatcattcaaatgagagtatctttggatggtgcaaaatgtgagaaagagaaagatgctgaggagaagtacgtaaaggggatactgccagttagaaaataaactaaaaccatttttctaaagagtgattttcaaacttggcatgcattctgaattccctaagggaaaggaaaagggggtggggtttggaaaaaccccaaaaaattggtttgaaagtcaaactttgccaaaaaaggcttaatttt

SEQ ID NO: 21 - DNA, 2295 bp, Homo Sapiens
gatcctagactgtcttcccagcaacgtgcggctcaccaggaacacgcagagctgacgcccaccccagagggctgctgagccaatctaagaaggcatttagcaggctgaggggctgtcataccagctctgtgcagcagagggggtgctcaccatggggaccgaggagcaggcattggcaaatgcctgatccagaaagcagcctgggttctggctcctgcaatttacccttcaggaacccaggttagttggcagcgtagggctcaggtcctggaggtggtgaaataaccctttctccctcgactcctgtcccccgcacactctgcctgctagagccactcctcactcaacttgcatttagcagggtgaggagctgtcatgccagctctgtgcagagaaaaccattgatcaggggcttgctatgcctcctgaaaggtatcatgcaaagcccagaaaaagaccgagaatgtcaagacatgtttactatgtccaaaaagcttgtaaaggggcagtacctaggaactcaatacactccagtgcaatctgagctgtaactgatgcaggaacaacatgctctggggaaacagaggcaggaatagtcctttcggctggagaaggctcaggaagtctcacggagggggtgacatctgggctggaccaggaggtaagagttcactgagcacggaagagacagcaggcattccaggcaggaggacacgtgggcagaggcagagaggatgcctgccatggccggggagtcctgctaagtgccaaatggctacactatgggcaggacagcttggcagggaaatgcagagcagtgggcgagctggacagaggtgggcagaagggccctgggtatggggctcaggtcttgggacttgcctctcagtggtggagaggtctgggtgggtcataagccaggagtaacatcctggaggtgttggaaagaccactctgagggcggcgaggggctgaccaagctaggaggcagggagacagtgcaggccaccaccagtccaggcaaagcatgacaaaggcctaggagcgaggacagagggatggaggagaggggacatttccgaggcaggacacatgggctctgcacaatctgtctcgcctaataatctgtgatcatccatcccagctcctaggccttgtcccttgaggacatctctgggtccccaaaagggcttaggacccagaagcgcttcagctgatgtctgctgccatgggtagggcacacctgactcccaccccaccccgccccacccacccgggcccaccagcacctcacctgtcccaccatggtcttggcgaggatctcagccctgcgcggcccactcagcatgtctgccgccttcaggaagatctgggcccggtctgcaataggcttcaggtcccactctttccgggcagccagggcagcctcaatggctttgttgagcaggctctaaagggagagggagaggttggggactgccacctgcagcgggaaaggccctggggagtgagcgagggaggagagacctgggaggccactctcttccatccggggacaatgcctgtctccctgggccctcagccccctgccaccatagctgccaacaacagcgtcccatcagagcctgtagtggctgccagtctgaagcctgaagggcccggccaggttggtcagctctccgaggccttggcactgagtcccgcagctgttacactggctccactttctctcatggtctaatcaaaaccttaccttattcttgggacctggtgccccttaacccaccatccagaaacttgaggtcaactggagcctgagacacggctctgctgctggcctcccagaccccaactgccctcatcgccacacaatgccagttcctggacccccagccaccccagcccctcctgctggccctttccagtgccaattcttggcctagctttccatcaatggtgtctccaattgccctgactcagccttccagaatccacctcctccccagtccaaggtctgccccaccacaatgggcatgtctgggaatgtctcagccctggctgaggcagcttgtgtttggctcaagttaacctttgtatgcctggcccagtcaaagacatcacccagggactccctcagtgtcagccaccccctgcccacctacccaccatggccaaagaaggacacagcaactgatgccccctgcccccgccatatcagcagctggcagggcagagcaggggcagcaaccctaaccccgggtcaccaggcacacaggctcactcaccttgtctgca

SEQ ID NO: 22 - DNA, 2657 bp, Homo Sapiens
acaaccttggggtggggtgggaaggaagccaataaaaagcaagctgatttgtgctgtagacttctggggaggctcaggaatttgaagcattgggttctttttgggacattggtctctgggttagcctaaaacagggattagttaaaaatctgagaagcagatccttttccttagcacaggagcaaactgtgctctccttccccatcagaacactgtggatgtattctctagaggggctaaacgagaggttctgggcttgagcctactaataccaggcatagttgagggtggaggtaagactctacattaagaacaggattaagtaaaattctctatgctgaatggtgattccctcttcctaccacttcctctgtttaactgccagaatgccaataggcaggagagtagatatgtcttctctgggtagttgaccaggtacaggaaagacctacaaattcactggcttttccacaatgaaatagccagctgccttgtcatcttacggtgaaggcctccagtagctaagttttattagcaaatagagatcttagtttttagtttcttgtcattaaataaaaagccaaggattgttaaatgtatgttcataaatattagttttacaagacactagggtgtgattccaacagctttgactccgtttaggagccggtgcttttgacttctttggggctaagcttcttgctgtggcttctgcttgttgctctggtgaagcactgaagagagggaaaacaatcagcataaattttttttttttttttgagacagagtcttgttctgttgcccagggcagaatgcagtggcacaacctcggctcactgcaacctctgcctcccaggtttaagcaattctcttgcctcagcctctgagtagctgggattgcagacatgtgccactacgccccactaatttttgtgtttttagtagagatgtggttttgccattttggccaggctggtctcacactgctgacctcaagtgatccacccaacttggcctcccaaagtgctggtattacaggtgtgagccaccgtgccggccctaatcagcataatttgtgatgtcatggccctagatctaaatgccaggagattctcacagaaacaaaatttaatgagtgcctgtatctgaattctgttactcaggatttattgatagttctttttcttttcttattttttttttggggatggagtctctctctgtcacccaggctggagtgcagtggcacaatctctgctcactgcaagctccgcctcccgggttcacaccattctcctgcctcggcttcccaagtagctgggactacaggcacccgtcaccacacccagctaattttttgtatttttagtagtgatgggatttcaccatgttagccaggatggtcttgatctcctgacctcgtgatccacctgtctcggcctcccaaagtgctgggattataggcatgagccaccgggcccggccaataattcttgaatattgatagtttattgaaatttgtaggcagatttaggggagatcaaaggactgctcttcagactgggaaagaaatagcttttctttctgtattttgacttgttatttttgattaaaaaacatgttataccaatttaaaacgcttctcccctttcctccagtgataaatgctgctcattctttctacaatggaacaacaaccctaccaatatcagatgaagatagaaccccacggaaaagaattagcaaaacgttaaatatgaccacaagtcctgaagagaaaagaaaaatcattggggatacttttgttaaggtacctttgtttttaatatcctcaacatgtactatttttgatgtgaatcttagtatttgtttttccttgtcactatatcaaataaccaaattagctaattttaatcctttttcttatgtggctgagagttttattgtatattgtcattatattgaccagtagaaactgttttatgtttttttgttgttgtttggttttttttttgtttttttgagacagagtcttgctgtgtcaccaggctgggctggagtgcagttgcacgatctcggctcgctgcaacctctgccttctgggttcaagtgattctcctgcctcagcctcctaagtagctgggactacaggggtgcaccatcatgcccagctaatttttgtacttttagtagagacgggggtttcaccatgttggccaggttggtccggatctcctgacctcatgatccgcccgcctcagcctcccgaacttctgggattacaggtgtgagccactatgcccagccaactgttttatgttttaataaacatgtttgcctacattgccaggctattattttaagaatagatgtctttaagagtagatgtattcagcttatcatagactttaattcattgattatctcaatggctaatttcaagctcttgaatggaatgttcacatacctttgtttttgtttttttttttttttggaggcggagttttgttcttgtcactcaggctggagtacaatggagcgatcttggctcacggcaactttcacctgctgggttcaagcgattctcctgcctcagcctcccgagtagctgggattacaggcatgcaccaccatgcccagctaatttttttcttttt

SEQ ID NO: 23 - DNA, 4001 bp, Homo Sapiens
ccacaggtggaatggtcagcactttgatcatgttttggggtgcctgcttcaattgctcgagacaattggatttcctaaaaatgatggtggagttcaatggcttccagctctgcaggctcttgttacacttaacattgagaggctttggcaggtcaagctggcttggaaatgtctggtcctgactctgtgccttgtctgaggttaagagactttagtttcagcctcagatctactactcatacgtgtgctctgaaaccatctagcatctctgagatgtgttccacctatttcataacactgtctgccttgtagtcatgagatgctctacagcacagagcccgttcatacttagtgttcatcaaaagccaagtgagcctagattggcccctaacaccttgggttatttattaatgacacctgtcaacaatgctggcctcctaggatttattttttgctttgtttgtttgcttgttttgttttgttttttgagacagtcttgctctgtcacccaggttgcagtgcagtggcgcgatctcggctcactgcaacctctgcctccagggttcacgccattctcctgcctcagcctcccgagtacctgggactacaggtgcccgccaccatgcctggctaattttttatatttttagtagagacggggtttcactgtgttagccagggtggtctcgatctcctgaccttgtgatctgcccgcctcggcctcccagagtgctgggattacaggtgtgagccaccgtgcccagcctgggatttgtttttaagcatcaataaattaatgagaagaaaatgactgacatttattgggcagtccttacatgccccccacataccctgccctttaattttacatatatgattttagtaatcctcatgtatcaattagtatacaacttgactccaacaaaagaaaattcagactaactacagtttaaacaataaaatattaaattatttcatgtaatgagaagtctgaatggtggctccaacaacaacatgaagtcccaacgactcagaccttttttttgcttccactctgccatcctcaatttgttgactttttattctcagcctcatatacccaaaatggctgctgcagctccaaccatcacatttgcacacaaggaaagaaaagaatgagtagatggtcattctcttcctgaggaagggaatcttttctagaagaccctagcaggtttcccttatgtctcattggccggaattggatcagaggcacatccccaggtcagtaaatggagaaatcatgagcaccatctcttctggggtcatgtctatagggatcataaacctcttccatgaacacaagcctgctgctacctccaagcagccacacatgcttcagcatcccttgttaataagctacaggaaaagagaagagaaggagtaactgtcatttaaacctcagtgtcgagtattcctactgagacctggagatgctgagaacttgccaaggtgtgagaggagttgcaaggaggccattgtggttgggcatggtgcacgaaagggagagaggaagaagtgtacagggagctggctggcccaggggccacgccaggactggggactctgtgctgtgtgatgggcaggctttggacagttgtatccagaagatgatctatacatgacgctagttcaaggattgctctgagatgtgtggatggtagaaggtgggcagggaggctgggtatcagtcaggaggctgtggcagcggtccccatggggagcacagggctggactaggacagcccatagaagacatcccatctcctttcttgcccaaggaagagactcagtggcagcagtgcaataagggtacaggccaggaaacccaaccccccagggatagcaagcatccagagacacgtggggacagctccagcaccaaacggcttctgaccaatgagcagagacggcaaacagcaaatgcgttaccgtggctttcacgtgtcatgaaggtgatgctgtaacctgagcctcagagctcattttatttgtgaattcctatcatctctagatgggtggactgaaagccacctctttcgcttgcagctaggtagaggggagtgcaagagggcaaatgaaaaccagaagtagggttgggcgcaatgcctcacgcctgtaatcccagcactttgggaggctgatgtgggcggattacctgaggtcaggagtttgagaccagcctggccaacatggtgaaacctcgtctctactaaaaatacaaaaatcagctgggtgtggtggcacatgcctgtaatctcagctattcaggaggctgaggcaggagaattgcttgagcctgggagacagaggttgcagtgagcagagatcgcgccactgcactccagcctggccgacagagcgagactctgtctcaaaaaaaaaaaaaaaaaaaaaaaaaaagaaaagaaaagaaaaagaaaaagaaaaggaaaaagaaaaccagaagtaggagcagcctgaagaaatgacagggagttgatttcccactgggagccctctcaaagcccacacacccgcctgcctggggtaacagtatctcctcggacatcctgcaccctcccatgctcccccctccctacagtagtgaaagacctaggcaggatgaccccagctcctctgtgagaatttcacaccctagtgtgaagtcatagccttgtaactttccctttaagaactgtcagagctggggaggctggccaagctcaggctggaggtggggacagagggaagaaagaaaaaaaaaaaagagagagaggcaggaaaagttttttcagaggaaaatgcagggtttgtccttcaccctgacgtcagatcttgctttaataaaaccccccaagggctgcggaagaggcatatctggtgctcctgatgggccggccagtctgggcccagctcccccgagaggtggtcggatcctctgggctgctcggtcgatgcctgtgccactgacgtccaggcatgaggtggttcctgccctggacgctggcagcagtgacagcagcagccgccagcaccgtcctggccacggtgagtcctgcctggaggggctcagagggagacccagctcccttctctactgggtcctgctacatgggggctggtgggcaggatgaaaagggccaggaaggtttggggctggaaggtggccacttacagggcaaggacagagcccagggtgaggagtcagctgcccaggttggctgaagctggcagggtgaggaggacggtgcgacacttggggaaacaaactgcacaggtccagcctgccctctctccccacctgaaacagtgcagaaagaacggggccctcagcagaactgggagtcaggggcccgggctccagacccgtcttcgcctaacctggctgtgtggcctcgggtgggtcactcaccctccaggagcagcgtaaagcgacgaagttgttaggtgacttctagagtctctgagtttgaaaactccaagactccaagcattggagatgctgcgaagatgggagatggaaaaagccaaaaaaaattggaaagaaaaatgccagctttcaacaaaagctccttattgagcaaacagtgctcagggtgatgtctaaccccaactgctgtcacctccggtctgcacagccctctgcagtctgcagagtgtccatacttgggtcctgcctatgaagcctgctgttccagggtgggggtgatgtgggcaccccagagtctctctctcttccacctgcaccccagggtacaccaaggggaagggacaaaggtctgcacctccaaaagccaggggagtcacatatgtgaccgtgtagagccagcctgctagggccaggcatggtgaggaaaaggcagaggcaggcagtgcaaggagggcaggaggtgggtacctggcagcttctgagccccagattccacagcccagggcaggacctgctcctggcagaacagcctagagacggaggggtgatg

SEQ ID NO: 24 - DNA, 2501 bp, Homo Sapiens
agccattttttaaaatggacaaaagtcaacaaagacgacagaaggatagcaagtgagcatatgagaagatgctctacatcattagtcattagggagttgtaaatgaaaaccatagtgagacaccactccatacacagaataactagaattacataaaggctgaacataccaactgttggtgaagatgtggagaaactggaaccttcatacattactggtaggaatgtaaaatggtacaactgctttggaaaacagtttggcatttcttcttttttaagatggagtcttgctctgttgcccaggctagagtgcagtggtgcaatctcagctcactgccacttccgcctcctgagttcaaggaattctccttcctcagcctcctgaatagctgagattacaggtgtgtgcccccccagccagctaatttttgtttttttagtagagagggggtttccccatgttggccagggtggtttggaactcctgccctggtgatttgccccccttagcctcccaaagtgttgggattacaggggggagcccccatgcccggcccagtttggcattttttaaaaagttaagtgtacccatcccatagatgtgatccagccatttcactcctaggtatttatccagaaaaaaaaatatatccatacaaagacttgtacatgaatgtttaaaacacccttgtttttaatagccaaaaactggagaaaagccaaatgtgaaaaataaacctaacaggggaataaattggtatatcaaccccctggaattttaagcaaaaaaaaaaaaaaaaaaaaaaaaaaaaaaaaaaaagaattatggatataagcaacaatatgggtaaatctgaaagtagtgaaagaaccagaccaaaaaaatatatactgtatgattctacttacatcgaactgtagaaaacgcaaactaatctgtagtaacaaatcggtgggccaggtacagtggctcatgcctgtagtcctagcactttgggaggccgaggtgggcggatcatgaggtcaggagatcgagaccatcctagctaatacagtgaaaccctgtctgtctgtaccaaaaatacaaaaatttaccaggcgtgatggcacgtgcctgcagtcccagctacgcgggaggctgaggcaggagaatcccttgaacctgggaggcagagattgcagtgagctgagattgtgccactgcactccagcctggcaagagcgagactccatctcaaaaaaaaaaaaaaaaaaaaaaaaaaaaatcagtggttgctcggcagggtgaggctgggaaggaggagtgagaaaggggtgggaaaaactgctggggtagagagacttggttaactggactgtggcgatggtttttctcttacgcttcacatgtgtgcagtttatgtccatcctccttcagtaacgctgttgaagttgggcagcctccccatattgagacaaacggcattgaagccagaagcatcctaggactccctttgctctctacacatcaggggttaggttttatatttctcaccaaaaaattagagtaagagatattcttaatttagaaatgtaccagagaatattttaaaaatcacactcggccgggtgctgtggctcatgcctgtcatcccagcactttgggaggcaggcagatcatctgaggtcaggagttcaagaccagcctggccaacatggtgaaagcctgtctctactaaaaatacaaaaattagccaggtgtgatggtgcgtgcctgtaatcccagcaaatcgggaggctgaggcaggagaatcgcttgaacctgggaggtggaagttgcactgaaccaagatagtgccactgtactccagcctgggcgacagagtgagactcaaaaaaaaaaatcacactcctgactaaaaatttccaggaggtccttttagttttttgtgtttgtttttcacacacagaccaaccaactaaaaagtgactggggaaaaaaaggaaacaccacactatatctttttgaaatgtaagtatacagattttaatttatttttaagaataattgtatattttaaaaacaggacacgtactgtatgagtaaacagcgtggctaacaccaagtccacactggtaagcttttgagaaccatttacactatgttgacagtagtactgctgcaggcagacagcggaagaataaataatagtgcttcaagaagagtagtgattgagaggataggtaaagagggcgcctcatcgtggaagctagagcaggaacacctccccagtagtgacatgtgcaaagttccagatctccacgacaaagacagctcaacccattggaacaaacagactcccaatgtggctggcaactgcgggggtagaagaactcaggcaaagtaggcacaggaatgggggagatgagagccaagggacaaacgccgagaaagcgttccgacaagcatgtgtgttcatacatgcatacccccaacaaagggcaatgcactgtgtaacagaa

SEQ ID NO: 25 - DNA, 4001 bp, Homo Sapiens
aacatttactgtggcagtatcaccacagatcttttctttgctctttcacttatattaatttaaaaaaatgctatttattaagggtcttttaaactttgtactcggactaaaatatatgcccattgtttagaagaaacaataataacagcacttaaaaacaaaaaggaaaaagaatgtgaaggccagttccacttgattggaggcaattcattctcccttttctaatttacctggggctggaaggcaatattgaaaaattttcctagctcctttttgctatttccaaaccacttctacttgtatcattttttgagacccttatgcttcataccttacttccttactagctcctgtaagtatctggttgttcctctacatgtgtcaaaagacgtgaggaatttacctgtcaccctgagctttacaagtccttgccagcctcacatctatgaggtgttatttttactctgtaccagccactcacacccaaagccatgtcttactgtcaggcacaattgttctgttagatcttatactgcaacccactctctgcccataacctatccttctcttacttccttgctcctgagcccctcacgatcagtgggatattgagttttgtgacatttttttcccagtcattcccttccatcttcccttctctgctcatctcaaatacaacaaatactattctgcacactgagaggtaccgattcagttggtctgaagtgggaccctggaatccagtttttaagtttcccgggtagtctggtgatgaaccaggtgtgggaacccctgctatgatagaactactcttgatcaatatttttagcgtcttccctttatcctttacctcacctgggaaagccctagccctgcataagtccagaaacttacgtgttttattttcttgggccactgagactattggaaaaagtcctacgactggtgccactgccaaacaagtctccaacccgtcagcttttttgttttacctgccactagttcagtggtccacattctcttcgtggactctaatttttagactttcctgtttaagcccctgtcctctctctaccttttccatactcagtaacttctttacctcttctatgcttgagatataccagtgaagactggccaggctctgtcctcatggatgttaagagtcttgggaatggtgaccttgtgagtgctagcttaaaattcctatttcattcgctgcttcctgcctttaaaataatctacagctgtactcattgttaagcccgctatgcagcccataagaggttatactatttgatgaaggcaaatttttatgctttgaattctctccccctcaataaccttctaatgaattgatttcctatatagtcaacctctcccatagtctataaaatatttcatcctaatacaagtttttgttgtctgtgcctccacctccagccccctcagccctctctgcctagcttttgaagctcttcaagccagcaatttgacttctgccatcactgctcttacttttctctcaagagccaccaaatgccagatccagtggatacttttcagtccttttcctgattacatctccttccttcttgaaagtctttattcctttggcttccctgacatcatttttattggattactttctctatttcttcctttttgttttgggtgtctccttctgcctactccttaaacttggttttctcaagaagttagtccttgggttacttttctgtaaccctgcattctccctaggtaatttaatccactctcggttttgattactgtccacatggggtgtattactgctctcaaatatctggctcctattccaacttctgtctcacacttcgggtttttatagccagttatctttgggatacctgtttgaaacaactctggttatactctactaccaacttttgccacatgcattccttcatgttgaaatggcatcatccagcaatttctcctattccccaacttcccatacctgacgatcatatctgaatagtcatttctctcttcaagctacatatcagaagtcttattgtttaaagaaattctaggccgggtgcagtggctcacgcctgtaatcccaccactttgggaggctgaggtggcggatcacctgaggtcaggagtttgagagcagcctggccaacgtggtgaaaccccgtctctactaaaaaatacaaaaattagacggacgagatggcgggcgtctgtaatcccagctacttgggaggctgaggcaggagaatcacttgaacctgggaggcaaaggctgtagtgagctgagatcacgccattgcactccaacctgggcgacaagaatgaagctccatctcaaaaaaaacaaaaaacaaacaaaaaaaaaccttttttttttttttaaatcatctatagattttaaggccctaaacagtccatagcaaaaaactagtgtgtatatttagttggttgaggcacttctttctaatcatgaaaagttgagcaactatatgctaccatagtgctgagccaccagttatttttgcacattaacaagtggagccctagtttaactctaaaaatcgccatgtagagcttacttatactttcaaataaatttacatgaatttacttaatatattaaaatgccacttaagtaattccataaactatggctcagcagtccatctttccttgagagtggccctggttaatctttatgttaatttttttccaagactcctgggttttacagttaagaggttcagttaatcattaaactgtatcgttgttagcacgtaggtagctttatattacttgtaccaacaaaacttaatttttgacacacctctaataacatcacttttctgttttggaagatcaaagccatcggccagacagagttgaatgcaagcaatccagaagaagtgttacagctggcagcgcagagaaggaaaaaaaagtttctccaagcaatggcaaaactttacttttaagcagttaaatttttttaacttttattttttaaacaatgggctaaaaataaacagtattaaaaggttaagtttatataatacatatgtacacaattagtggtgttttcttttcagacaaaatactgaaacaaatattagtttaaaaacaaactatacagaagacttcataccgtaacaataaatgtatagtttcttcaaagggagaagagattcacatatctgataacaaaataaactagcaatctagttttctaatctactttatgaggctggattttttttttagaaaagctaatttaaaatatttagaaatagctagcctatgtacagcaagttttcatgtctttttttaataaatagatttctaggagtcagtatatatttaatactcttcttccttaagaaaatagaagtttaggtcaagtgttaagctttatcactttgacactgtccttatctcacaatggaggaatttagaaaggaccttaacagtttcacaaacataaataaagccttagtcacactaaattaaaaaaaaaaattccttagggatatcttagagtagtaaagtgacttcctcatataaatagtttgaaagggtacttaagtttttcacccaaattgtgatatacaaaaaggttattaccaagcaacctacatgtcaagaaagccccagttaggaaggagccacagcatttatcttgtttataatttctttggtactcccactgtttagagcacaggttgaacaccatgttcatctaagccttattagttaaaaaatgtgttatggcaaggcaaataaactagtttaaaaaacattaaatttcaccatttgtagaaattcaagttttataatagcttgctatagcagctatagataaattagtcaccttattacaaaactaaacctttgtaaacaagtttaaatttaattttcaagaaccaaattgcactagtcaagagtgtaggaattttgagaatctaacaactagattcaaagta

SEQ ID NO: 26 - DNA, 2501 bp, Homo Sapiens
acggtgcttgacacagtaaatctcaaaaaatgcattattattattatggttcagaggtaaagtgacttgcccaaggtcacatagctggaaaatggcagagccgggatggaaatccaggacttcgtgactgcaaagcagatgttcattggttagtgaactttagaacttcaacttttctgtaaaggaagttaattatctccatctcacagtctcatttattagataagcatataaaatgcctggcacatagtaggccctttaaatacagcttattgggccgggcgccatggctcatgcccgtaatcctagcactttgggaggccaggtgggcagatcacttgagtcagaagttcgaaaccagcctggtcaacgtagtgaaaccccatctctactaaaaatacaaaaaatttagccaggcgtggtggcgcacgcctataataccagctactcgggaggctgaggcaggagaattgcttgaacccgggaggcagatgttgcagtgagccgagatcacgccactgcactccagcctgggtgacagagtgatactacaccccccaaaaataaaataaaataaataaatacaactttttgagttgttagcaggtttttcccaaatagggctttgaagaaggtgaatatagaccctgcccgatgccggctggctaggaagaaaggagtgagggaggctgctggtgtgggaggcttgggagggaggcttggcataagtgtgataattggggctggagatttggctgcatggagcagggctggagaactgaaagggctcctatagattattttcccccatatcctgccccaatttgcagttgaagaatcctaagctgacaaaggggaaggcatttactccaggttacactgcagcttagagcccaataacctggtttggtgattccaagttagaatcatggtcttttggcagggtctcgctctgttgcccaggctggagtgcagtgacataatcatggctcactgtatccttgaccttctttctgggctcaagcaatcctcccacctcggcctcccaaagtgctaagattacaggaatgagccaccatacctggccctgaatcttgggtcttggccttagtaattaaaaccaatcaccaccatccgttgcggacttacaacctacagtgttctaaacattttatatgtttgatctcatttaatcctcacatcaatttagggacaaagagccccccaccccccgtttttttttttacagctgaggaaacacttcaaagtggtaagacatttgcccgaggtcctgaaggaagagagtaaagccatgtctgctgttttctagaggctgctactgtcccctttactgccctgaagattcagcctgcggaagacagggggttgccccagtggaattccccagccttgcctagcagagcccattccttccgcccccagatgaagcagggagaggaagctgagtcaaagaaggctgtcagggagggaaaaagaggacagagcctggagtgtggggaggggtttggggaggatatctgacctgggagggggtgttgcaaaaggccaaggatgggccagggggatcattagtttcagaaagaagtctcagggagtcttccatcactttcccttggctgaccactggaggctttcagaccaagggatgggggatccctccagcttcatccccctccctccctttcatacagttcccacaagctctgcagtttgcaaaaccctacccctcccctgagggcctgcggtttcctgcgggtctggggtcttgcctgacttggcagtggagactgcgggcagtggagagaggaggaggtggtgtaagccctttctcatgctggtgctgccacacacacacacacacacacacacacacacacacacacacacacaccctgacccctgagtcagcacttgcctgtcaaggaggggtggggtcacaggagcgcctccttaaagcccccacaacagcagctgcagtcagacacctctgccctcaccatgagcctctggcagcccctggtcctggtgctcctggtgctgggctgctgctttgctgcccccagacagcgccagtccacccttgtgctcttccctggagacctgagaaccaatctcaccgacaggcagctggcagaggtgggcaaacacctagtctagagttggggagggctgtccgtgagggtgttgagtgtcccagagaggatgcagggcctcagaggagatgctttaggggtgtgttggtggtgatgggcgtatctgaagaacagaggtgtccagggttaggcagtggggggtcttgtggaggctttgagcagtgatggccagaaatgggcaatggggctttcctaggtgggaaatgggaaatggtttggggtgggggaggcattggagggttctggggtaagcataggctgggagtgaacaggggcaaaccttatgcagctgtggggtagaaatgggctagaggcatccaggggtga

SEQ ID NO: 27 - DNA, 2501 bp, Homo Sapiens
tgtataacatttaaaatatagaacaatttaacatatatggaattatgccatatgtattttcagccttttcttcacttaatagctcttagagttctgcctgtatcagaacatatagacccacctctaacagatgcatagctttccacagcaagaatgtaccataaattaacatcttgcatattaaacaccggttggttttacatttttgtgttgcaaacaatgctgcaaatgaatatccttatatacaggctgggcatggtcaatcacgcctgttttgccagtacttttggaggctcagactgtaggactgctcaagcccaggagcttgaggccagtctgggcaacacagggagatcatctcaaaaaaaaaaatggtttttgattgattgaaatgcaaattgtcttccaagttaaatcctacatagagttagatgtgtgcctgtatccgtctgccttgctaatgcctattataaaacttttacatttttgatactttgacgtaaatattatgtgcttttctttttctgattatttaagaggtgaagctcttcttgttaattgggcatttttcttctgagttttatcttattactgatataaaaattcttaatgggagtttggatatcacatattaaaacgtgatagaaaaattttcccatcttttaatttggtttatagtgtctgtttttttttaatagactcccatgactttccatagactgtagagggtgaagcctgggaatctttttttgttgttgttgttgccgcccaagctggagggcagtggcatgatctcagctcactgcaacttccacctcttgggttcaagcaattctcctgcctcaacctcctgagtagctgggattacaggtgcccaccaccatgcctggctaatttttgtacttttagtagagacaggttttctccacgttggccaggcttgtctcgaactcctgacctcaggtgatctactcaccttggcctcccaaagtgctgggattacaggcgtgagccaccgtgcctagcctttttttttcttaagtgaaagcaaggctattaggaaagtaaaggaataaaaaatggttactacgtcagcagagcagcctagtctttaaagatacattacctgataccagtcttcttataaaaatcccatgacaaatctacttgagtattcactcttgtttttaatgtttgccatttatttttaaaatacttaattgtacatacttgtggagtacattttgacaaggtttcatacaagttgattccagggaaagagataattattgggagaaacatatttaaatcattgttttaacctatattaatctgtcttgctttctactaatagatttctggctgctcaaattcacattgcactggaaagctcagacatcaaggcaagttgagtactcatgggtattagactgtcccacgtgggccttagcctcagacagttattttgcttttgtgacctttaacatactttgtgatttaatgaatgccatctgttgttaaaagctgcaacacaggaactgctccacctcatgaacatactgatcatagctaagtctcaggaactgttagtatcataaacggtaataacttttcctggaagaccataaaatttggggattgcttgtaatatagcaaatgacctatttcccctaaaaaagcaatttgaaaacaatcctgagaaattacccttaggacacagaagtaaaataaattactaaagagtaattttaaaaaagtataataaacttttataaacttaaaaaaaaaaaaaaacaactggaattaaccttggaaagtcatctctaaggcctctagctttcatatgagttctctaatgactccttctcatagaaacctcatccataataccacagttctacctcttcactccaggttaagcaaaaagggaaagtctcacattcagaagtagatggaagtaataatcagggtacagtagaaagaaatccaatagacaacttcagaacaagttattttattttgatgaataaaagcagtagctggcaattgaaaaaaagttatttgctcaataggacagcacataccttaaaagtaatgggccttttcttacacatgaaaacaaaggtattggttatagagactacacattatttggttccaacttcactgggacaggaaacacaccaaaggaagtgctgaagcctgtgttggtatgaaacctgtgatgaatgtgacacataggaccatcaactcaattcttgtttctgaaaacaaatcctggaagcatcacttccagaaacacttctgtccctagcagagctccagccaggctccaggccacgaggtgctgtgccacagttcctcagctctggtcagttactttcactatctcaatcttcgagcaagtagttagggttaactaccaagtagggatcttcttcatagctctcacttccctctgtggagcctttcaatccagcctgggtgagctcaattagaac

SEQ ID NO: 28 - DNA, 3303 bp, Homo Sapiens
tcaccagggttattcagacaccccggctgtcagggtccttggtggttaaacctgggaaaaggccacatgaagacaactgtaagcacacatgatccctctgaattgttttcttttcctgcaattgtgcttgctcttaaaaattgaagttttaaacagggctcacatgtgatcatccttccatctattggagtctagcttgaaatgtgacaaccggaaccaaaagaaccttgaatttggtgcctactttggttttggtgctgctgcttctcaagatcctcagcagggattaagaagttggggtgcacagcaggaatatcaggaaattggcaggcttgacttcctggcaaattgctagcaggaccactaaatgctgaactgtactgtgaatgtataccgaaatacaagcaattatttctgtactaaaggtgtttttaattttgtatttgtgtaaaaccacctttggaagcagcaactatctagtcagaaaagcaaatgatgtttccattaatcttttctggggaaaacattagtgctaaggatttaacaatctgtaggtaaagtttaacctaacagtattccacaaggagactttttattatcagacggttgcctaattttcatataatttttatattaatataatccttggttcctccccatccccttcataggccacagctgaggtgaaaagggtcctggaatggctagtgagagctagaaattcagacgggaaaattgaaactcagagcagaaaggcaagctgcccaaaaataacaacgctagttaatggcacaattgctaccagacccaagtatccagacttcctggagctgtgagatctttcatcaccaccactctccaggtaccgggcagtgcctgtttctggattcaaactcacagcagcgaggaaatcctattttagcaaagtgatctactgttactgttgttagtgcacccctctcctgcgtctctgcttcacatccactccctcgccgcccgcccccaaacacttggattcttcctagcctctcacaggtcagccaccaccagaggaccgtgagcctccggcaagtgatcaaatactgagcccgaatttcggcagccgtaccaacgcaatcctgggagcccattccacccactccgcagcccctctcccacctcacctcttcccttgtcagaaaagcggacgccgccttcccagactctcctcatgaaaacagcacccatctaaatagtgatcatgaaaaatgccccttccagtccacagagaaaaagctttctccttttctaagagtccatgggcgccgccatgttgctgtacggaaaaacgtttccagggcgagttgagcgttcagggcactcctcggcgctcaagctgcccacaggtcttccgacctaactttaggggtcgtgccagtcttcgtagagacggccacactggcccacagaccccagttcctggggtgacgcagctgggcgcgaccagcacgcagccttccagcgacgaggcggtcgcatggaagttactgcgcgcgtcgtgcgtaatgacgtcagcgccggcggagaatttcaaattcgaacggctttggcgggccgaggaaggacctggtgttttgatgaccgctgtcctgtctagcagatacttgcacggtttacagaaattcggtccctgggtcgtgtcaggaaactggaaaaaaggtgactgaatgacatcggattaactttgtttctgcagagctgttctggaggaagaaagtgatggcgccaatgacttaaatttagaggtcctgaggcgatgttttggtgtttgtttgctgttgggagaagcctcgaggccaaaactgtgcgaggcgctggtttcacgggatctattaaatttctagtggcaacgatttcccaaggaggaaaggggagggcctgggggacactgatgaggagtggaggctcgggagaggaaacggggaagaattgaagggggcggaaagagatggacaagagaggactcgttgggtgggttgcgtctgaatactagtgtagcttcttatggccgtgtaggactgcgtgtagaagtcttcatcttaaatcatgagagctacattctaagtggagattaaacgtggacacacaggtgtgagtggaaaagttgaatagatgaacaagcgcatattgaagaggaaataggcggccaaaatcaagaagagtctaatcagtgtaaaagactaaggagtacccagagaagtaaaaggattgtcaccttcctgaaagccagggcaggacctgagaaggctgggtgcagagatgagacaggatcaaaagttttgtcaatcatgtgtatcctaggagacaaattttttagcagatgtgaagggagtgacctgttaatgtggtttgtaaatggaggcagcctatagaccattttatggaccggatgatttatccttgttgaaggggagattgatgccaaaagggcagtaattgaggaaacaatgggttaaggacagagcaggagagattgacattaggaaaacagaataattccattctctgaaaccaaagaaaaggaaacattttgaggtgaataagagaatttgaggtaatttttttgtcttcctattgaaataggcacagccaacagcagtaatgtggtctgggtaacagacagggctttagctaccacggatacccttgtgaaggcaaaaaccgtaacttactcgtctttgcatctcctgcattgcctagcacactcccctatatatatagtgggcagttaataaatgtttatgttgaatatttttaaatggaattaaatagatgttccttgcaaatgagaacttcagtgtacatgaacaaaaaagagataccccaggggaaagatgatgatcttgaagaaacaatgaaacctgactgtctttctgtttaaggataaatagttgcttaatgtaccatctctgtctggaaagttttttttaaatactgaattcgtgaatgtaggtcataagcatgaagcgcagttcagtttccagcggtggtgctggccgcctctccatgcaggagttaagatcccaggatgtaaataaacaaggcctctatacccctcaaacgtgagtatttcccttgtggttctaatttgcatgctttatcatcttaggcaaagaaatcataagaaatagttaatataaagatgtaatatgagtgatgtcttggtgaatcttgtctgttcccaggggtacctaattttggatcaatgaaatctaaaagtgggcatgatactctgctaggtgttgtttgtgtcatttgtttcac

SEQ ID NO: 29 - DNA, 4001 bp, Homo Sapiens
tgttcactttattttttcttctgtatgcttctcaaattcaataatttcaaatgagctgttttcaaatttgcttattctttcttctacttatttgagtttgctgttgaactcctctaataaaattttcaaattagttattgtacttttcagctcaatatttttttttataatttctttgttgatgttctcattttgttcatatgttttcttgactttcctttgttctttgttcatgtttttctacagttctgcgagtatatttgacatttgtggtttttttttgttgttgttttgagacagactctcactctgttgcccaggctgaagcgcagtcatgtgatcttggctcactgcaacctctgcctcctgggttccagtgattctcatgcctcagccttctgagtagctgggattacaggtgtgcagcaccatgctctgctaatttttttgtatttttagtagagatggggtttcactatgttggccaggctagtgtcaactcctggcctcaagtgatctgactgccttggcctcccaaagtgctgggattataggcatgagccatcgcacctggctgacagttgttttaaagtctagtaagcctgatgcctgtgtttcttccagaactgtttctggagatgtgttttgttcatttcagtgggccatctttccctggttctttgcatgccttatgatctttttttgaaaattgggtatttaaaaaaaatatggccactctcccagtctttgcagactggcatgtaagacctcactaatttgtaagtccatgaggtcttcactaatctgagattagtccaggtcttctcaggtcttttctaggcatgcttccttcctgtgaatgtgtgtgtgctccctgtccccatcaaaggtgattttaaaggtcttcatttcctaaacagtctcactgcagctttttcttagggccttagatattctattgtattcctctgtaatctcctgccctcagaggtccacagggcagcaatccctgtgtagttttcatgtgctgcattgctcaccactgccttctgtggcttccagcctgaaatcaaaactatttgctgtctccagtctgatacctgagttggacattacagacaccatttctgtaggcagcccacagacaggccaggatgttgcaacaagtttcactctgctccttctgtccaagtgttcacatttccatgtttctttttatgtcacatcattttgtaaatattatgtcatatggatcctggatccatatgacagcttcttctcagggccttagatattctattgtatggttggatccaatattatgtcatatggatcctggatatttactgtatttactatattgtggcattggatggaagttatgtttttgtggatcatgttacaatcatctggaaaatgccatttttgttttagcaagaaatcaatctggttaggttcagactacaagctgtcttgatcttctgtgggtggtggttaaaatcccagtacacttcgcaaagcctttgctatgctggtttgagtctgtctcacttatgaatcagacttatctaggttcatacacagaattagagcttctttctcttggctctgggagtctcttcttgctttcactctttagcccccagagggcccttttccttttcaaagtgtttttgttttcctcaacttctatttggctggccactccatggtcaccgcagcaccaccccacaataggggtgtgcctctgaggcagaagtattaggttggtgcaaaagtaactgcagttttgccttacttctaataccatgctccggagttagattccagcaattgtgtttatttctcataatctgggaaacttatccttgtgcagttgcttctctgtattttgacaccctttaacaatccacctgcttttgattaatttcagcatgctcaagtagttctttttcgtatttcttctagagattttagttgtaatttgtggaggaatgggcagtagttggcttgtgctgccattgtgggatgagaactctgcctagatttttatcttcattttgacatttactgggagtttgactctggagaagctagtttaatctccatgcctcgggatgcctacttgaaaatgggtagtagcaacagacctacctcatttttaatttttggcattgtttttggtggataaaatatgataatgggcattaagcactagtaactgctcaattgaaacgaatgcttatttctattcttatattttctataaaactgaacatcttggattacaattactggaataaaaaatttagaactaaaaagttaagagatttggtgagttagctaactttgaccttaaaggaaaggtcaaaaggaagactaagaaaagcaaaatatcccatccttttctgtagcccttggaattacaccctcagtccttgtcaagtgatagctatgaaatcaaaacagggtgttacaaggacaatcaaggcagcttgcagggatgcctttcataaagtaccacattaaacaagaatgggactctaacaaataagaaaacaattactcatacagagcattgctttccaatgaaatgacccagttttcccttcatgcctctttattaaattgtgcaaaaaaacccaactaagattcttatttgggttcttattcttattcttgattcttatttgttttctagtaatactattccttccattttgctcccttgctacatggctgaaaaagaacatgcaacccactgaagacctcaagtcagtgatctgtaggctgtcagcatttggcccaattcagtcagccactgtttgtggacgtcaaagtgctatagtggcattcaaagacatgacttcagcctgtaatgctgtgagtgcttttcaaagtaggaccccaggcaccatgttccagtgttcctggcaacaacgattcatgtcaaaagacgtaagactctctactaccaaacacctgtgtgaattcttaagcttgttttacaaaactttttattcatcagagctgtagtgaaatatcatcattgtaattgatattctagcactacaaaaggcacaatgaagcttatttagttccagtactggaaatcagaggtaacagcacatccttccttggacatgctttactctgctgtagtggtcatcacagttttgattttctggataagaagttcaccacagcatttgtgcattcatctgatagccatcttccctgaaggacattgcattcttcagcattaacagcgtgtagtttttctctctctcttttcctgattacctcttttgaaattctcaaggcctggaaaaacaaaaccaacaataaggttaagagttgacctaggctggacgtggactcatgcctgtaatcccagcacttggggaggccgaggcgggcagatcagttgaggtcaggagttcaagaccagcctggccaacatggtgaaaccccatctctactaaaaatacaaaaattagctggttgtggtggtacatgcctgtgatcccagctactcaggaggctgagtcaagagaattgcttgaacccgggaggcggaggttgcagtgagctgagatcgcaccattgcactccagcctgggtgacaagtgagactctgtctcaaaaagaaaaaaagagttaatctaataggagtgagattattctatgattctggttcttgtttctcccatgttcatttaataaatcctgttaaatcttttttttttttctgagacatagtctcactctgtcgcccaggctggagtgcagtggtgcaatcttggctcattgcaacctctgcctcccgggttcaagcaattctccctgcctcagcatccagagtagctgggattacaggcgcccaccaccacgcctggctaatttttgtattttttaaatagagatgtggttttgccatgttggccaggctgttcttgaactcctgacctcaggtgatctgcccttcttggcctcccaaa

SEQ ID NO: 30 - DNA, 5001 bp, Homo Sapiens
atcattctattttatgtttaaccactttctaaataaatataggtcatcaggatagagaaaggccttagaaaatcagatgagaaaaacaaagaaaaaatgattattatattgtttttctattggcaaaataaaatgaaatcacgagtacattagtttatggacaccctaatcttgaaaataatctgaataaagcaattattctcaattttggaggtttttttttttttttactaaattcaccaaatcatggattaagttctgtttcacattgtgaacactctaatacttatttcaatgttacaatcacaggtattttttcccatttaatattaagctatttaataaaatttttaaatgccaatgtacatttataatattataaaagataaaatagtttcttttccattagctctctgttctttgttccttgaaaaaatacaaaattaaggatatgttttctcatattccttatgtgaacataatttatcaggcctcttctgaagcaggagttaataccaaacacagtctgcaaattcaagttcctaattatgtcccatgagcacattaaatttttccttcgcttttccactatttgaatcttttatttctttcttttctaattgaattggctaacacattaagaactacattaaataagaaattagagagtatctttatcttgttcctgacattaacggaaaagctccaaagtgtttcactaacaagtcagctactgtactaacttggtttgagaccattgtataaatcatgtcaagaaaggtttaatctcttcctaatagatcagaaattgatgtgaaattttaccaaaagcatctgttgagattatcataatttttcttctaatagtgaaaacttttaacacacttcttaacgttgaacaaccatccttgagttgctggaacaaatcttagtggggtcataaaattatttaagtatactgatgaatactgtttaataatattccttttaaatttttacattaatatttataaatacaatttacttacagtttcatttttttatactttttaaaagtttttgtattaatattatgctggcttcataaaaatattgggtaatttttcttctttctctgagctgaaaaaattcaaaattattggcttagtactttttgagggtatattgtgggtatagtttcttttttttcttcttcttcttctttttgagacagagtatagttttgagtgggcatagtttcctttttttttgctcttgttgcccaggctggagtacaatggtgcagtcttggctcactgcaacctctccctcctgggttcaggtgattctcctgcctcagcctcccgagtagctgggattacaggcatgcaccaccacaccaggctaattttgtatttttaggagagacaggatttctccatgttggtcaggctggtcaggctcccgacctcaggtgatccgcccaccttggcctcccaaggtgctgggattacaggcgtgagccaccgtgcccagccgcgggtatagtttctagataacatattccaattttttccccatacctattagtctgtttagtgtttttctttcttctgaggtcaattttggtagcacctactttattagacaatcctccattttatccaggtttccaaactgatgtgtagagagatgtgcaaagtactctttcatgatttttatttcttctctgttttaatttctcttttcatttgtacttttctatatttatgattttatcctttttcttgattacactagtataatttattttattttttgtaaagaattactgacagatttttgctttgtttaccgtccttctactttactatttttaacatcaatttcttctttcatttttataactttcttccttctgccttcttgaaatttactttgttgttgttgttttggttgtggtttttttttttttttttttttgtgagataagttcttgttctattgccttggctggaatgcagaggaaagatcatagctcacagcctcaaactcctgggctcaagcgatcctcccatctcagcctctgaagtagctaggactacaggcatgcaccaccacatctggctaatttttttcttaagtatttgtagagatggggtatcaaaatcctgtgctcaggtgatcctcgtgccctagcctcccaaagtgatgggattacaggcatgagccactatgcccagtctaaaatgaatgatatatttgaaaaaatatgttcagcataaaatctggatttaggattacaaaacttaatagaatacacttttatttctgtggtataaatttatgaatctgcatttgggtttgatttcaacttttattgtctaataaaatattaggattaacatatttattaaacatgtgggaacagtcaacagctactaaatttctactctatgtccagcactgaggtagaaattctggtagcacaaaagaagaggtaacattctctcatgtctttccacattttaaaatattctctagaaactggtaaatcactagcttttataaagaatctttgagtatcagttatttagatgacagaagtactttcagtccgtaaatcttggcccgttatgatagacactgattactgcaataagaattcattccctgacatatcctacttgcacaataaatgatgataagatcaatgtctacaaaatcacttatgatcattactattgtgacatagtctgaggaataaatgacataggcaaagcaaatgaggccctaaaatactggtattttctcattacaataaagcccttacagctcctatcattgtagtatttatatggaacattcatgtacatatgcaatcaaataatagaaatacatttaacatagtttaatttgtgactatttgaaaacaacagcaaatgtcaaactgtgttgaactgtgaaatgcatactattttatttatttatttgtttatttatttctcacataccattttaaatgaaccctgctgaccttcttccattccgtggctgaaaaataatagattagaaataaatcagtgtaactaaagatgcaagctaacagtcatagaaacagattgatgatttagaggagtgtttaacgtgcatcacaatcatctagagggctttttacaacatagactgctggaccccatagccagaatttctgatttagtaagtctgagaatcctgagaaatttgtatttctaacaagttctgaggtgctgctaatgctgcaaagaccaccatgaactagatgctatttgactttgcttatttccttgatggtaccaacattttaaaacaaatgttctcaattttaatttgatatgaaccaaaatgaacttactgaagtcagggctgtttagctgcttacttcttcctgctatcagtccaattccttcattcaatccattctctaatttgctgttagaattattttccaaaaggcaaatcttaccacatttgccccctccttagcctttagtgtaaagctgaaatttcttagctaaatatttcatcaaccgattcccattgatgcttcaggattcagcccttgaagtcttctctgtacctcttccattccccagctggaattaaatgcttttcttttggaaatcacagcctttggactacaagtgcatttcacacagtactttatatttgtttacttatctgttttgagcctatctaaattcctagagcataggaatggaatcctatctgtctttatagtcccagcccttggtacattgctcagcacccagtagaagttcaataaatagttgttgaatgaattaattaaaactttctggtaatgtattaaggatgcaaatattttgcaaagtgtagctgcctagaaaaaaacctcacattttatagacaatgtggacaaacaaaatcagaactgtaatcctgaaattctgtctacttataccttttattatggcagattcttttaattttaagaatttgtgaaagtattcgtaactcttccaatctactgagtcaaaaattttgtaaataattccatagaacataaggaatagtgtatctttaagacagttactttctatacataaaatgtcatggaattaaagtgtcaaataggtgaatgctatttgaggtgtttaaacatgagcaataggtcaaagaagagatcagagatcagagatactgtggtattgaagcaataaggtggtgacagaagtgaatgtcagactgtaacacctgatgccaaacatctataaactttaaaacttaattgaaatgtaaaagttaaatacacagggaacatatttttaaattttggtgtagattgattttttaaaaatacagtatgtacctaccctgaataaaaaatatcctcgactttgacttgcaaagggactttggaattcttcctagaagagaaaatgagggcattacaaatcacataacactaaaaataagtgcaaattctccttgaaagtatattgagggtcaaaattactttcaactgtcataactaaacatagagggaatcagggacttgaatagagaatttttgtatcatacctgaaaattttcaacaactagcagtatcatcagaatcttatatttaaaaataatttccttgtcagtgtgacagatttgcctttcaggaattttgtcagttttaggtgaattcatcaataagtagaaagagaaatgacagacatttcataattgactatatttaaaatctcctttcagcattttgttagaatgaaataatttatttaaaatacatattgcatgtgttaacccatgaacaggggaaaatataaaacagaattgtgtcaaagctaaaaaatattatccaatatttctacagaaatgtagtttgaaattgaaggacaaatttggtaaattacatttattcaatgaagctttaggatagatgttcctaatataattatatgtgcagaatgttaatttttaaatatccaaatatta

SEQ ID NO: 31 - DNA, 2501 bp, Homo Sapiens
ctaggccctcaaccaaaaccctaaaggaagatacactttctccaattcaccactgggaaaaagtttatctctttaccaagcgtccttcacccaccctgccacctccagtactgaaagggttgcaagctacaaatgaatgggcattaggaatttgatagttgatattcctcctccaaaaaagcctagatactatctctcacttacccagctgtttaaacacaaaccaagttgttttgctttgtttactctcaacctggaaccactcttctctctccccgattatccctccctcagttctcattcctattttcttctcctgcttagcttgttcagttttcttgtatagcttagtaatcagatacttatgtaacacttttctttcaagaaactcacagtccataactaataggatattaataatcttttccagttatgtgagaattacttgccctagtccctttttatactttataaaaagggaagaagggaaacactataaatgacttgtgggtcagaactcttttgtcctattattcttttttttttttttttttgagacggattcttgctctgtcgcccaggctggagtgcagtggcgctgtcttggctcactgcaagctccgcctgccgcgttcacgccattctcctgtctcagcctcccgagtagctgggactgcaggcgcccgccaccatgcccggctaattttttttttttttttttttttttttgtatttttagtagagaatggtttcaccgtgttagccaggatggtcttgatctcctgacctcgtgatccgcccacctcggcctcccaaagtgctgggattacaggcgtgagccaccgcgcccggcctttttttctattattcactgaagaatcaccagcttcttggagagtacctgatacatagcgtgtattcggcaaatacctgcttaattgaattcggtatttattgcatttctagatgctataagcttgagactagcagaaagtgatgcagaattcagaatgggtgatatggcaaatgccttattaaatatagggctcggcgcggtggctcacacttgtaatcccagcactttgggaggccaaggcgggcagatcacaaggtcaggagtttgagaccagcctggccaatatggtgaaaccccgtctttactaaaaatacaaaaattagcggggcgtggtggcgggcgcctatagtcccagctactcgggaggctgaggcaggagaattgcttgaacccgggaggcggaggttgcagtgagccgagatcgcaccactgcactccagcctgggcgacagagagagactccatatcaaaaaaaaaaaaaaaaaaaaaaaaaggatatggattgtattccataaacagttgaacctcttattcctactgccctgatagttggtctggctcctagaaattcagattttcttccctccaggtgagattatgcgaagaaaggaacactggcaaaattatttccctgattttcttctctcaggctgtctttccctcccctttaagattgtgtactccgtctcaaaaaaaaaagaaaaaaaaaagattgtagacccagcctataaattcataggatcaagaattcttactaacactctttctaacaaccttaaatctctgatagtagcacccacttgacttcgttttgtatggatagatttattctaatctctctgtagattgttttaatcccaagcagatgcgagagcataaaatagtgtatttgccctccctccaggcttttctggtagtattttgtctgtgaaactaagaggctctagctgctattagaagagggaaggagtaaggatgagcttttgaaaaaaaaaaaaaaaaaaaaacccagggtggagagagtggaaggatgtggttttaagagaggggggagggagggcgttattgtctgtggggcgggggcgggggtagttctgataacacagaattccgagagatcacaagattgcttcaggggggtggggtggggtggggtggggctgggggcttgtcgccctttcaggctccaccctttgcggagattataaatagtcatgatcccagcgagacccagagatgctgtaatggtaagactttggatccttcctgaggacgtggagaaaacttgctgctgagaaggacattttgaaggttttgttggctgaaaaagctgtttctggaatcacccctagatctttcttgaagacttgaattagattacagcgatggggacacagaaggtaagaatgatataattactggttatttttgcttgtttgggatacactcagaaaggcaaatattaatggtaatctccttgttctattttctcctaagtcaccaagctatcttaaggccttttcatttcgtctctagcctgcactgctgccgcttcatcagttctctttgaatgtcatacagttctgttcaccttatcataggaaagtcacccggagaagttgtgtttgcttctcaggtttatttt

SEQ ID NO: 32 - DNA, 2501 bp, Homo Sapiens
tgtcttgaacagccctatttgtcagattcactaactgtgtaggcccccaacattttcaatcacctcacaacccaacaggatggataagtagctgggcagatggggatctgacaggtgaaagggaaggaaagcctgtcttcttcttgagcagctgctgctctggtgaagacacagggcctgttacaagctttatttattaattccttcacccatccatccttttattcattcactcatccatccatcccttcattcattcatccatccttccaccaaccatcccttcagtcatccattcatccaatagccatccatccctcttcccatccatctttcctaccttcatctatctacctatccacccattcattcatccaatcatccattcattccagaaatatttattatgcctcagcttagtttctctccaatatcaaatgagattaggcccattgatctatggaattttcttgtttcccaagtgttttctggaatggtacattgaagtgtgggaagaaaatttcaaaacttctatttatatctcttatctcttcattttaataatgtctagttggagtgtatgttttataatgaacgcaatatattaatacgatagtgtgtatatagtttgaaattacatgctcaaaaaaattttgcactagcaaagtgtgcagtcaggggtgtacagatccaaagattttggagaccacggctatgaagattagtggtaagactacagagcaatttgggatagacaggtactagcttttggggtgaaaaccatgaagagcccccagcaccataaagctgggcagctagaaaacatgcctgccactcagagcaaatgggcccactttcatctgattttattgcccatgattgcacaggtggttactgcagcaccagaaacagaggccagtcctgctccagtctagctctttttccacacttcctcaaagaagcatttggactgtggcccgggcttcaaaccaagagggcagatctttaaataacctcactccctaccagagtagcctcaaactttcttgcccataggtgaaaatagagattttcagttaatgaaaatgtaaatatctgacattcatgtaactttgtatctcattcacacccaatttctatcatcttacaaaatatatcaattcgagcaaacaggattttttcttatatagactttttttagcatttttatcgattcacctaaaatgtttccataatttgcccacaaggcagaatgaacatagactgttcttgaatatgatactcaagcttcaaagctgtaaaatactctcttctttcataggtactgaaaggtttgtctttggctatgttttctaaaagcaacccccttcaaaaatattagaaaataaatgaaaataaaatgctagtattaattatgaatgagaaacttaaactgataaaagtaaaaattgttcgacatttttagagctgtaatcttcagtaaaacagctaacaactgattgagagttaattataaggggtttccccatagaacatggaagagtgcaaaggagtactcagtagctgtttaatagcaaagtttctaccattgaaaatgacaaaatccaggaagagaacacaaaacaaagaagaaaaaatgctctaagtctaggacctcaagagccatacaggtagcaaaatagaaatggttatttcaagcctgagctctgcatctaactaatgatgtcaacagaagtgtttaccttgtgttgttgttttgcagaatgagttaatatattgggacctacttttaggaaactctaaaaaatgagtagaccaaaaatgtgaggcagagaagcaaatatcctgaccccctgttttgatagaagaggcttatccagagcagaaaattctgttgaagagcttgtcctttaatatgaatgagagttcttatttattgaatgaattgttaaaataacatttagcaatttaacaaaatcacaaatcaacacagagaagctgtatcttgttcttttttattgaacaataataaacatgtccttttaaaacaaaacctaacagcttatgcagctttacattcaaaggccttcccacacacattcacaactctgttggccaacttcaagaataaaatacaggtaaatactgaaataattcttaaataagttcttcacttcaaataaaatacttctgagatatttcctaagaacatctagtacaacagtcctgtttgtgctaagattctttcaaatatactcctaattccacttatcaaccaagtttaaaagaaaaaaatatgaaaataaactatattttaaagttgacatgttttctgctgaaaattgattcttcttttacaaacctcctaaaaacttattttctaccttaaattgaaaattcacctaagtcacagcacttatgtttaaataaggaccctctgttgctcattttttgacatttttgaaatccagagtgactctgtttttcttatgcttattaag

SEQ ID NO: 33 - DNA, 4001 bp, Homo Sapiens
gttcatccatccttactgcacaaccaggtgaatggaacatcctcctaaggcacttaaatgatatttgaatccacaggtcagcaaactaggacccgtgggccaaatctggcccactacctgtgtttgcaaataaagttttattagaacacagccacactcattcatttaaatattgtccaggactgtttttgaactacaatggtagcattcagtagttgcgacagagactgtatgtcccacaaaatctaaaatatttacttttgttttataggaaaagtgtatcagcccctattaatccaccttatgtatgaatgccagattaatgttcctaaaatgccatttcaccatatcattctgtagcttagaaccctgcaatgacattgcattgtccatgcaataaaatctaaacttcatggccctccatggtatagtcctagccaatctgttgagtcattgatctctgttcctaaaggcaagccctacaaccagttagattttcctcctcattgtccctggaatatgcagtgcatttctacccttgttcacctagttccttttgcttggaatgtattgcccatttgtatctacctaaatcctactcattccttttttttttttttttttttgagacagagtctcactctgtcgcccaggctggagtgcagtggtgtgatcttggctcatggcaacctctacccactgggttcaagtgattctcctgccttagcctcccaagtatctgggattacaggcatgtaccaccacacctggccaatttttatatttttagtatagatggggtttcgccatgttggctaggctagtctcaaactcgtgacctcgggtgatccacccacctcagcctcccaaagtgctgggattacaggtatgagccactgtgtgcccggccctaaatcctacccattcttaaaggactaacatgaactctacatccttcatgaccatgtcagttacagtgatcaccaatgagcctgctgcttgagcatgtaaaggtccactgcccatactgcctggtaagttttcttctgctcagagaatggttcaccaatatgatgatgggcaactctggagtgaggactttctgatggaacaaagtcacagctgtgggaaagcctgggaatggtttggaaatgacaagacatgtaatgagaacacatgacactcaattaatatttgtggaaatcttgagtcatcagcctctcatatctatgacatacatcttggttctgtatttaaatgtaggacaactacatatcttgatagccagtgggaatgactgacaaagtccagtaagtctactcttgagagattctagaatgtagagatagcagctggaccaggaagccctagctttatcatgtgccatctctgagatggtggatgtgggctgttcccactgtgcctcacttttcccatccactgtcatatattttatggtcttgcacacactctgggattaagtaacatcaattatgcaccattgattggagttctttggtaaatggtactacattcctaaaatattcatgtgtcttactttgtcagggagattatatccgtgacttagatatcatattctagtggcttaagattatgagctaatattttgtaaggtctgggcattgcacagaaaaccttggttgtaatacacattattattacattgatttgaatagcaatggtacaatcatagccccggaaacatagcgactacataaaataaaagcttccgttaacactgagcacagcagccaggcttccgcattgttgttgtccctaggatttggctgttgtattgtcaaatgccattatgtcttatctaataagtttctccctgcatatgtgagtaaacgaaaatgctccagtatagtaaatgtctcagcaaaccactcctgtacgctttggaaacagaacattaacaaggaaactatcatgagagcagacctttctgttctcatgaatcacattcatatgatgtttattgtccacattggagaagtatagagaagaaaaatatgaagggtacactctaatggaaaggttatagtggaaatgcaaggaaaatatatccctttacaaccagcttctaggcattacctagaagtaaaattatgacaataagactaacagcaaataacattgagcacttactctgtgccaggtattgttctaggccttttacgttacatcatcttatttaatccactccacaactaagtggtttggatgcagttattatctccactttatgtacgagaagaccaagacccagggaggtagaagaacttgtcagaagtcagacaggtagtgagtggtagggctgggagttggacccggacagacagattccagatttcatatttatcgtaacctcagctgccccacccacatgaaatgctaccccaaggctagtggcagcaaatataacccatttcatttgcattgtttggtatgtccaactgggtgatttgtcctacaaaatttgaaacaacgtctgcttatttatgtctgtgattttgatcaaataaatctcacccagaatttcccactgtcttattctatggtatttgcagtttgtaagaacctctgtcttttggattgagacgtttttattctttgtgtccaaattaacactgcacagaacatggttctctgtgtgtgtgtgtgtgtgtgtgtgtgtgtgtgtgtgtgtgtctgtgtgtgtgtgtagaaaccgtcttttcttttggattaaattcttgcagcctggctgagtgaggagaatttctcccactcttcgagcctacagcagacatgttaggagaatgctgctgcttgcaacacacccagagacggtggggcaggtgacactgcgtgtgtgcccggtgtctctggaagtgtctatacagatgtgtgctgctgctgctgctgctttctgccttaaaatttctggagccaacacccacccactcttacagcctctgtctctttattttcaaggaaaaaagaaagaggcagactgaaatagaaggcaagcgacaacagcttgacgagcagatacttctgctgcagcattccaaggtaagcagctgatcccaggaacctattccattattagacatgcagatcacactccggagagctgggcagtgcctgccctgccgtgaaggcgctgccgccaaccaaaccagcctttttcattcaatcaggaaaccatctcttggcttttcttgtgaatttctcaaattcagggcattattacagcattccaatttctgcaagcataagattacagtgtgcatgtggacagggtggagggtttgtgcgtgtgaagtgtggtggctatatatagaaattggatgagaatacttcacagggtgggtgaggcagcatttcaggattgtttctcccatgcataggtgctgggtgtgtttgctcagagaccccaaaagatatatttcacggaacgttctttttattcacttaaaaatattagtatttcctttcttgatatggagaaaagggagattaaacgatgtgatctgataaaagaacaacactgtgtatttcagattattcatttattttatttgtactttaacaattttgaaagtgttctgtgagagcaagcagttggtcaaagatggctttgaaatgatttgactcagacgggtctccatggtaccatctaaaaagagagagagagagagacagcacacaagagctgtttattttttctttaaaacatgatgcacttaagcatcgtaattgattacagctcaggagaaagctctgtcactgtcacaaggaccccactggttgcagaatgttgcttttcacatgttcagagaataatgtgaccacattccaatggccagccgggagttgttgcttgcctttgactgctcctgggctttttggcaggaaaaccttctcctgcttacctcatgttgctgtgacattgcctgcacagagctgcattgctcagaggactgggtggg

SEQ ID NO: 34 - DNA, 2501 bp, Homo Sapiens
ctctacagggatcagcaacagctgcaacacaagagagtaagacctaaaaacagtaggtggtttgaatatcccataaaaacgtactcatatattacttataaaatttttaagaatgaacttccaaagtttcatcctgctcttatggtcagctactgacattggcctacagggccttagctggcatctgcatgctgacatctcccaattttgttctaatccaggtgactctaacaagctgcagacctaaatacccagcagcaacccggaagccctctcccgctggatcctccacacacacttcacctccccagtactccctcccaagcaggcacaaatcaaatgcctgagacatcctagacacttccttaaaccctacacctagtcagtcatgctgactcaatgcttgaatcgtcactcctcctaatccccaaagccacatctttcatccaggccctcatttctcactcaagttagcacaaaaacctaattgctctccttgggcgttatcttccttcccctccaatttatcccccaaactataaccaaaaaaacttactaaaatacaaattgaaatatatcagccttccaactaactcctctacccaaatccctaatcaccatattaaaacctgcaactggtcatcacagcactgaaaataaaattccaacagatttcaaagctgtctatgatcttcctccactctaagctcccatattctagtcatgctaaatgccttaaagtgcgcctcagaatgtatcccattttcactcatttgtcaaaggtcatctttgctaaatagctttcttggaatagctccttcttcatgaagactgaacatgaaagtcctctgtcttctatgacatctacctaatcatggcactttgatgattacaggtgactaaaagtcaacttttcagttaactacaagattctaaaggcaaaatgtctcatttctgtatttctactgcctgacactagggggactgaataaatattcatacactttgtcttggaaggtacttcagaattaattctggttctttccccatcctttcactgaatgtctgttatgctctgtaatcgacgtactgagcgaaagtccagcttcttgaatacctcctgtgatggggaagtcacttattaaacaccaacaccaacaaggcctcatgctggatattatacacagaactccactagaaggagctcacagctgagtctgttccctgacacctgacaagatcaagcccctgctgtgactgcagctggaagctgctgacttccagattgtcacaggtctcagaaacacttggcagaaggaacactggtgaaatgactgctagaattgggcacgggaagaacagtcctatactcagcagagaggagacacactggcctaaggttaatgtccaggagttaactggcacctcgagtggacacattcaaccaaatgggaaagcaaagtctgctaagactcaattcctaaccagatgaaattttatcaatgttaagtgtaaatatttaatcttttagtctgggcacagtggctcacgcttgtaatcccaacactttgggaggctgaagtgggcggatcacctaagctcaggaatttgagatcagcctggccaacatggcaaaactctgtctctaccaaaaatacaaaaaccagccaggcatggtagcctgcgcctgtagccccagctactagagaggctgaggctggagaatcacttgaatccgggaggtggaggttacagtaagctgagatcgcaccactgcactccagcctgggcagcaaagtaacactatgtctcaaaaaaaaaattttttttaatcatttagaaaatcactctttaaaaacaataaagttgcaacattttcaaatagttaacactgctgggatttccccagaattcttcaacatcatgttgtcaaaaagaaaaagcctaatggcaacattttcctctaatgccaaaagaatctaagagaaaggagaaaaaaattatttaaattattttattgaaggagataagttactcagatattaactggttgtaggcaaagggaataaacatggtgaagtcaggtttgctggtaaaggggagacagtactaaacgccctgcccaacaaatactcagaatccagggttttcatatttctccatggttcaatctctcacaggtcactttccattcaaaggattatggagaccaaataagacaggattctttcaggtatcaacccagagtctttaggtcttctctcagccaaggcatcgagtgaaaatacaatttatttttcggattcctctggaggattaaaaagtttctttcgcattgcaatgccatgctccctgctcttggtcctgttttctacgtactgaaaaataaaagaagggggggagaaaagaaacagcagattatgtcactatttatagcagtttactatttagaaatatttgcaaaatataaatgtcctttgaggttaacagggtttaaattt

SEQ ID NO: 35 - DNA, 2501 bp, Homo Sapiens
aatatacacacaaatatgtaccatggtcctaactgggggagcaagtccccgtggttgtgattcccgagcaaatatttgtctgttttagtggcacagtcgagctgactgctgttcggaaaagggcaagctatcttgggaactaaacatataaggtgagagtagccagtgccgcagctgttggcaaggtttttgttgataataacagaagtacatcccttagaattggctattttgaaggcttaaaatagaatggaagcgacttcacctacccaataattaaataaaattttagaaaagactaaatatgaaatgagcaagattttctataaaatatcatttaaaaaaaactttccaaatagcatttatctatttatgggttgctctttattcttccattttctctaccctctagcttcatgacttaatttcaaaccagcaacatatagcacccagacaagtcacacttctttattcacagacagaagtaatcatgaagtatcacaagggatttgcaatcaccaaagaagatgcagataaaataaaccactcttaagctatggaaattcctattaaggaattttattagattaataagaaaaatccttatacctattaatatagtcattttacaaggatatttttcaaatgtcatttgatattacttttgttaacactttcaatgacaattctgatgagctctaattttggatcttttatggttactgctttctgtgacctaagaaacctttggctaaccccccaagtcacaaaaatatcatctgttttcagttaaaaagcttcatacttttaaaatattacatttaggtctatgattcatctcaaagtcatttttgtgaggtagggggtcattgttcacttttttctatatggatattcagctattctattctggctccatttgttgaaaagactttccttctctgttgaattgttttgccacctttgtcgaaatcaagtgatcatataaacgttgatctgttttcaggctctctcttctgttccattgctttatttgtcaatcctagtgccagtatcacactgtattgattactaaatacaacttaccacaataatcctcacattgcttaacaaaatttaagcctcaataggaaagaatatataaattaagctgaaataaacgaatgagatcaagatgagccttccttaaaaatctatttttaaaaattatatcatggctttgaaaacactccataattattactgtatcaacagcaaaacatatttacccacaaataactgagagactacatattttccattacctccaactgaaattatgtatgaaaaatatttcattcgtttttctatcaatttcctatcaggtttttctccattagttctaagtcatttaataccacaattactaagcttaaaaacaatccttaaaaatgtgctgaagctggaagatgggtacacattctccctaataaaataaattatgctaaattgattttacaataaataataaaatgttaaagtcatgtatcaacctcagaaatattcttgataaagaaaaaagtaggttacttcctttaaaaaagaaagctttataaagtcttctttaaagtctgacttgcaaaggaagattagaagcagaagattattacaaagcaactcccaaatcaatttttaaaaatcaattgtgagcaaattacatatggctcttgaaaactgcaggctgtacgaaatttattcaaattggcatagaaagacccccatcaccactaccatctttttaaaaaagcagataacatgaactgtcagacctccagtttttttatacacagcttacaagcttgaaacaatattccattgagagtaacaccaacattctttaagatttacaatttcttcttaacctgaaattttgctttgaagcataatactcagaccttcctgaaacaattctctaatacataaacaaataaccccaaacacttgaagaaaatttactaaaataaaattgagatgtttattacttttctactgacagcagtgaaaatcactggaaattatacttttgtcctttttaaatgatttacattaaaatcatactttctcaaataactggtatagcagataaaattcagttttaaaatcctcaaaacacttagatatcaaagatagaaatactgattttttttccgttaatgatgagaagaaataagacaaccagtttaatcaagatctgacaattgcaaattttaagtatttaaattacagataaggaatatcgtttgtgcattttctagcttcatatggtagttagacaaccagaaaactaacagttgtcagactcaatgtcaaataatggaatttgggaaagcattcttaatatcactttcatttaatatgcactacatgcacatgatgcaggtagggaagaagtttatgaatccatgcattaaagacaagacaggctggcactattgccaaacgtgcactgagccaattaggat

SEQ ID NO: 36 - DNA, 4001 bp, Homo Sapiens
atgaagtgtcacatagagccttaacagttataatatgagcacgctatcattaaacacaagccaattaaccaatgtttcctcaatcatgaaagtggttttccatttgtaaatgaccgtacttcacagctacatgaatcagaagaaaatggaaaccctacagaatgggaatcaaattaacatttgtgattagtcccattttagcttgagacccacaaacagccctctcaagtctacagttctaatgtgcagagcaaagcaaagatcatgaactgatcacttggaaaactactctccactgaaacaatgtgcttttctttcctcttctatgaaacagagatgagagtacaccactgttatgaagaacaaatgaaaccaaagctcaaaacgtgcctactacttagcaataagcacttaataagtgctataattattattcagtttagatacaaataattatctccacttatgttagaaacctattgtggttcaacctccctgcttatatgctgtagatgtaatctgacagtacaatgtaaaccaaatgtaacgctcatttcttcaaacaaaggtacagaatatcacgttaatgaaagaactattttaaaaatgatgacatggcatacattgacaactgaagtagagagaaataaggatgatgagggcatgacaacttcaaaatataatttgaacaccaaacggctctaacttcatttccaatacatatccccaagaatcctctgatggagcacactgaacgttttggcttcatctattagcaataccttttctttccacctggagaatttctttccaccctctttatagtctcagttcacgttacttcctgtagtccttcccaaaatccccaggcaaaactatccctccatgaccccaaagcactgagttgacaatgttagtaaagcaatccacacactgtattacagttaagttctacaagcgtgtctcccccagtagcctcttaagttcgacattggtacccagggccacagtccgtgacactgaaggcacacaagatgtttgatgaattgaagtggattctggaattttagggctgggaagggccaaaggggccgccaacacttgctttcggatgcaaaagtgcgacaccaagaagactaagcgagctgcctaaattatagacagtgactgtgaaagaacgaatactcaagtttcctttcccaataaaattcatgaggacaagactgtgtgtctggctgattgctcccaactggttcacccaacaaagaatcggagtgtgtaatacatcctcaattaagtgttttccattacaaaacaatataaatgtcaatccataaacgctggaaacacacaaatcctaaagttaaattttgcgccggtcttgtatcaattcccaattataaaaatcctgagaaacaggcaaaatcaccttgtacggcaacacgttatatgaaaatagtatttgtaaaacacttaatcctttctggcattaagacatttaaagtgaaatctgtttccaggcttacagatttacagaagcctatctacacagagtgagtaaggtaattaaagcggacatacagtatatactcaaaaaatttatttacacagtgcaggctatgttaaacgctaataaaatgcaagtgacaacttgcctttgtgggaaccagacacaaagattcacattttgaggaagttcaagtttaccggccaacagccacaccacgatttgctgccgtcatagacgggccctaaggagaagtactgcttccagcaagtcaaatacttggattttatcaatggcgagacaaaagaggcaaggtgcgcccaatgcacaaatgctaaagtaaacaatcagtctcctttgcgaccgtcaggattagaagacagcctgagtccttccaggaaattcatgtaagcaggtccccagaactcgctgacaaacactgcagccgaaggcgggtatgaggccaagaaaggccaaggaatcactgcgacccctccaggagggcgtggggacggccgagcacaactaggcacaaaggtagaaacgcaacatctgggcgggtcccggcgccacctccgagtctcagggcctccacgcgccccgggggccagacgctcagacctaggactaccggtcccctcgtggtaggcaggtgaccgattccacttaaaggaggccgcaggccttcatggaccccaaagcctacatgccaagtcaaccccacagagaggccgccccgtctctcagcaacggccgcagccaagagccgccgcccaccccggcccggatcagcctgcccgcggccttcctcctgctgtcccctatcccgcaggccaaatcgggctggtcttaatcccgaacggtctgtggggccccttctccactcgctggagtgcggggcggtgggagagagcaggggctacaaggagggtcgacccaggtgccactgccccctcagcactcaccatggcgactccccagagcctgcagcaagcagcacccgccccgcgcgtagcctcccgcggtcatgtgacgctgcggcccctccaagccccgccctctctagccccgcccccgggccctacaggcggctcattgattggcctacttctaggaacccgagtctcgcgtgcttattggccctgtcacttaacgctagatggacggacctgagcgccagccaatctcaccacagcgtgcgagagtgggcggagcagtgcagggcagtggggatcgcccggcggcaggcaggagacaacaggagggaaaggcagtgtgtgatgagtttgtcaagaaggaatggaaggagggggagccgacaagtccacgttcaccgcatctgcgttggcgattgcgctattgatgcgcatgcgcaaaaggaagaccctgattggtttgtgggacggtctcaacgtcctgtcctaaccaatccagatgcgccgggggtggggcctggctctcactggccggtgcagcctttgcgcgcgggtttcgttgacccgcggcgttcacgggaattgttcgctttagtgccggcgccatggggtcggagctgatcgggcgcctagccccgcgcctgggcctcgccgagcccgacatgctgaggtgagttcggccgcgcaagaccagggctgggcttccgcctcgcggccctgggccctcaggtgaggcccgcgcccttcccaggcgacgggcggcgggggagtgacggggagcgctggggccgggcggggtttagggcctacttcaagaaaaacttctcggccgtgagcttgaatgagatggcaagaagggcgatagcaaacggcgatggcacacgtccctgggaacagccagccctgtccgtgggtagaaaaatgagccagggagaactttccgttcattccgccaacgcctactgcagtcgggtttatagcggggaacccgacaacgaggcgcagaccccgctgtctgtaagggcgaggactgtgtagaccttaaccgggcaatgctcctgagccactgggcttggggtggagcgcggcctagcggctgcctttaacacaaagaaacaaacaaaactcggaaaagcaggcgccgttcccgctgaggccggattgatggcagatgctaggcgaggaaagatatggcaagagcagcccaggcaggggcgacagctcctgtaaaagcgttgagatgggaagcgggatccggggttcgaaataaagccattgtagctaaaacgtggagcagtcaggcgagggaaggcaaggaaaacagcacttaaaagatttgaagacaaacctgcaggactcggtagtcatttagaacagtggttctcaaaatgtggttcctggaccagcaacagccatatcatcttgtcacttgttagaaatacaaattcttgggtcccacctcaagcctgctgatcagtaactcggcctgggacccagtaatttgcaagtccccaaggtgattttcgcctaccatcaagtttaagaactactgatttaaa

SEQ ID NO: 37 - DNA, 4001 bp, Homo Sapiens
atctttctatactcattgcctattactttgctccagataactgcatgcaaaggaggcttctacctcagggcctttgtacttgctgttcttccacttgattgaggaggtctttcttgcctatacttcataaaataagaaatcaactccagccccagatcagttttctccagtccctttcattgcttcattttcctttataatatgtatcactaactgtcacgtttgctatatttgcggagtgtctgcatctgctgtctagaatgtaagctctataggggcaggagttttgtctcattaactgccatgttcctagtacaaagcccgatcaaataagtcatgtgtctgagtgtgtatgctgaggtgggggagatatttcagaaacagtattccttggagtttgggaacgaaaaaaagagttggaacttgtagccttctgacctttagctcacaaaacagaaatactttaacaggtacaagatgaaatgactcaatatttaaaatactcaactatattctacacgaaactggctatttctataacttaatttcctaacagctttaaaagttactacagatgagatgaaaaagaacaagtcatctttctgagcctgagattcacctgtaaaacactcacgccaggcattgctgggaggagtgcaaatgatcacttactctgtgtctaagattgacacctgatttctttcctatagatataaaatattttcatttcaactcttctttaaaaaggaaaaattgtggtttttttcttacaactgcaaaatttgaggaattaaaccattctagactcctcttcagtgccccatctttatccctgttccacaaccactatcctattgtcagcatgagacaagctcagctgcaccagaatggtagaaaatgtccttagaactcgtagggatattagatattatcctgacctgtaactttcactgaggaataagaaagaaatgtatcagaatgaggaggaaagtgtttgaaaaacacatttaaggccgggcgcggtggctcatgcctgtaaatcccagcactttggaaggccgaggcggacggatcacctgaggtcaggagttggagaccagcctggccaacatggtgaaaccccgtctatactaaaaatacaaaaattagccgggcgtggtggcgggcgcctgtaattccagctactcgggaggctgaggcaggagaaccgtttgaactcgggaggcggaggttgcagtgagccgagatggcgccactgcactctagcctgggcaacagagcaacactctgtctccaaaaaaaaagagaaaaacacatttagtattatacttttttttttcagaggagaaaacccctaaagatttggtaagagaaggaaaagttcaacataattttcttggttgatgggggtgcactaaagatactgagactcaaccaaaggaatatcccattagggggctgtgaaatttttgtgtttatcaaaataaggtaaaagcttttttaagagcctgagaaactcttatttagactaacccactaaaaatattcacagtttaaaaaataaacagaaaaagagtcccaaaaaagttaatagacatgtccaactcagaaaactgggaagtggctcaaacccttctgagttctagtccagttctccaacattatatattggctacgattaatcaagatttaattgtataccagctgccgaaatgtttcccgtacaataaaaatcctcaatatgaaataaaggtttcatattactagtcgagttctttactaacaaatttccgaccttgcctcccatatccacatctaagaagggaggtatatctcttcagcatttactaaatgcttcttttgcataccattaagtcacttaatacaattctgccggctcaatggtactgtacccactttgcagacgacaagccgaggctagatgaagttaatcataaaatcagcggcattgaaacttaactcagtgtaaccccaaagctccctctacaccaagctgctccctgtacggcaacagaactcctggaacttgtccgcagagaatgagcagggcccttgcttttttatggtcttggccaggtttagcctgccttgtaacccgcaggtaacagagctatggaaatcaaatgaatcgctgtcaagtcggtgcaagattactattcagcacatttcatgaagacctggtctcaactgaacagactgaaaaccaatttcacaatttctttgcagtgtctcttagaaactagccactgtcactgcttagaaaatcgggggactgctccctcaagtggtcaaaacgggcctctcactagagctcgctacttgtttagccggtataaggccagtcacacaatcctgcaaatttcccgcaacctcccgaaggggtcaaagcccacgccccagcaaaagcacaggcgctccccgcccagcgaagacatgcgcatgcgcctatccgtcttctcccaaagcaaccaccacctggtggcgccacttccccccacgcctgtttcacccattcagccctctctttcgaatacctttgtccaattccataagggcagagttggcatccagttcctgttcgccatagccggcatctgccaggaaagacttagttgagtttgacgccatgacccgaatagttactcgactagcctagtcagaaagcttgcaaactctaccccaggaccgccatcttcccccgccgccttcttgctggtttttcttccgcgcgctgtcaagccctgttacgcatgcgccctggtcaccccgcggtttgtccgcgcctctgctaccccctgcgcaggcgctcaaggagctcttggactccaggttcccgcggctgggagaaaaggaggcggggatccgaagggggaaatgactctgaggcgcccggacgtcgctcggaagccaatcagagagcgtgacgtcagtttggcgcggagtttggcggccggggcttacagtggcgggagttggaggcgataacgatttgtgttgtgagaggcgcaagctgcgatttctgctgaacttggaggcatttctacgacttttctctcagctgaggcttttcctccgaccctgatgctcttcaattcggtgctccgccagccccagcttggcgtcctgagaaatggtgagtaacggtcccaaccgctgctcggagctggcggaattcatttcccccgaaacacacgccacctccgaccagggccgactccaattctgaactcagcttctgagttctcccatggcaagggtaaattagtgttagcagggactactaaagaaagctgtactttcatcccctcgggacacttgtaatcgtaatcgggcttttaaaatcgtaacgtaggcagggacgtcgaaataactgccttccaaggccccttacagcttacatctccattgcgcgttaacgggaaaatgcatgcatttgtgtgtatatgtttccttcaacggttatttgagatgctcaaaactcctaatcattgattaattcattcgtttgttgtagaatcttagtgagcccagctatgtgctataggtatataccagtgaatatgacccgctgttaaggaactcagtcaagcagagaagacaggatatctgcttctaacaggaacaaaatcttattttccccgtttactacacggtcataaaaatttaaattatagagtgaaagatgcctgtaaccacatccgccagagatgacccctgttaatagattgaagtatattattccagatgttttcgacgctagaggtaatacctattattttcagaaatcggatcaaaacgtccagttttttcactttaatggtataagttgaacgtattcccatgttaatacgtagaaatctaacttattttcttacgctaaaacattggcaataagagatttgaggttagatttggatgtcatcaacttaaactttttggtaagtttcagataagggagctaactacccagattaaccttg

SEQ ID NO: 38 - DNA, 2501 bp, Homo Sapiens
aaagatgattaaaagtttaattgttcatctgaagagttgatttttttattcctgtaataaagggtacttttagcagtctctgctcatcttgcccatccggctctttttgtggttgtgtaaggttataacttctgtgtctcagtaaacttgtgcatgcccatttttttctctgttactaccttttctcttattttgttttattattttgatgtaaaattacctgttaattttatttgaaatgagaaattttaaggttcacattattcaaattctgtcagatccctacctctgtcatatggtttataatgtgctgggtattttcagacctgcttattaaaaagatgtaaaacaaaataatgatcactcctgtggatttttcctttatttttgagatgtctcctttggctgcattacttcttcaccccttgcccattgatcagaggaggggtcttaactatgggtgaaccctatatcttactgaagaggttatgttacatgtatattttcataatataacttacatttacatagtacttttatttttagcatacctttttttattaatcctaataatatcactgtaagttatgttgaagcagattgtaagtgttcatttacaaattgtgaaatgaattaaaatgaaagggcaaagattaaatcatgaccaggcctgaaattaacacacaagactcaatttttttcaaccaaagacttttgtaggtgatccctgcctgcaggactccccttcctcctcagatgtcattggattgtaccaggtttactgtagattctagccgttgtagaactaactagatctaagatgagtcccctgatttcctttggtagagtcttccaattgctgaactccaatattgtcgtgactagccagtgttacaacctgtctgccttattttgtgtaatggatttcatattacagaggcatttttttaatgtcaagatgtttaagtattgcttaagtgcaaactacttaatactttttagctattaagtaattaagataggcaggattttatttgttccaaaatgatttgacctaaactaaaaagagaatgtggatctcctgaatcttacttggttaatcttaatataactcctagcattctataattcttcctaaagtcctcttacctggctatcttttgtatcttctttgtctctcctcttctttcccagtcataataactgccagactctgcttcatttctctttgacagtctctactcctaaggtcatccattctctttaggtatcttttggcctcagtttgagcacagcagatcccaagaccacatatgccatagcataggctattatagtcaaccttttgaataaatgtgattgaactttatgttagtaattcttatttaccatcttcctatcaaaaaggcttaaagtcttcatttaatgctctccttcatgtccattttgttaaatgattgccttttaatgacatcttagaacttcagaactatttcaccatggaggatgtgtaagattagccttttatcaaataaaaagtgtgaaatggaatatgtaatctcattaatccattctggctctaaaattctgtgactatcagataaaattcagaaataaaatagtattactaatataaataaatttttatcataattatatttcctaagttttgcctgtaagaatgggtaaaatatctttaaaaccttgaagaaattattacttgatagaaagtttaatccatctgtgagaaggcaaatgtattcagacacaactaaagttctctcttctattttaatttcatttatcttgaactaagactccactgtttcatcctcttagatgctgctacttgaacaatattgttttgagaccaaaaactagcatattaacacaattcttcttaaacgtcttaagagttttgtttcctttacccctttctttaaaaacaagcagccactaaattttttagtagtgaatttcaaaatcctttttaaccttataggtccaagggtagccaaggatggctgcagcttcatatgatcagttgttaaagcaagttgaggcactgaagatggagaactcaaatcttcgacaagagctagaagataattccaatcatcttacaaaactggaaactgaggcatctaatatgaaggtatcaagactgtgacttttaattgtagtttatccatttttattcagtattccctcttgtaaacttgaggtaagacactttacttaaaagtgtattttaaattaagcaataatatgtaaactctttcttgcaaaagttagcatttatatttttaaataagatatattgaattcattcagtgaatcatataaagaaaataagtgtaaaactccaatggctagttagttcttagttctttttaagattaaagagaagagaccaaatatagcatcactgtactgaggcaaggttttctgtgtagttcatagaaactagcctcatgattttagaatatgccttgaatatt

SEQ ID NO: 39 - DNA, 6277 bp, Homo Sapiens
gtgcgccaagatcatgccactgcactcccgcctgggtgatagagcgagactctgtctcaaaaataaaataaaaaattggcccggtgtggtggctcatgcctgtaatcctagcaatctgggaggctgaggtggaaggatcgtgaacctaggagttgaagaccagcctgggcaacaaagccggaccctgtctccttaaaaaaattaagttcaattaaacatttttaaaaataataaaccagtcattagaaccataaacctgtactgtttttgacaatgtaatgcactgccctgtaaaacactacaattaagactgttattttaaggaccctgaagtctgtgaagatcaggcacttttttgaaaccctaagataattatcccccagttttctccattctttgtttctacctagaaccaagttcaccaccaaaacgcagtcctgctgacgtcaagtattcattcatatgacatgtaattactggggtcgttaaaatttgggcagaatctttgtcaattcaccaggaccttaggcaaaaaatcaggaaaatgaagtgactgactcagtctgccaaaagcggatattctgaaataccactttccaactttaagaaacacttcctgccaggtgcggtggctcacgcctataatcccagcactttgggaggccgaggaaggcagatcacgaggtcaggagatcgaggtcatcctggctaacgcggtgaaacccccatctctactaaaaacacaaaaaattagctgggcgtgatggcgggtgcctgtagtcccagctactcgggaggctgaggcaagagaatggcgtgaacccgggagacagagttcgcagtgcactagccgcgatcgtgccactgcacttcaggctgggcgacagagcgagactcagtctcaaaaaaaaaagaaaaaaaagaaacacacttccctactcgttagggaaattaatcttcgtctctttttctcaaattacacaattggaaattaatttagatattctggagctcctccagctggtgggccaactaagagaaaacaggaagtgggagattctagcttagctggaccatatccaggtctccataaggaactctctttggctggcatgtaaaaaaattctttcagcaagagcattaatcttgaacgtgtgtaaacacgaaagctatggttaaccctacctgctccttaggtctacagccagtagagtcagatagctgggtcctaggccttcagctttcataattgacattattgttaagtccatgtgactgactcaccttgtcttggcacaagttagcttttcctccacatcgatttttttttctttcagcctcaacaaaatccctttaatgaaacaaacctggcaacccgaactttggttactgtctccaccagaggcctgtacaagccaagttatccaagctgaggccgggagtggtggctcatgcctgtaatcccagcactttgggaggccaaggcaggaggatcgcttgagctcaggagttcaagaccagcctgggctggtctttgagaaagcgagactttgtctcgaaaaaaaaaaaaaaaagtgtggcctgaaagttgagtgtttgacaaaaaggagaaacagtgcctttccaaaaccaaaggtccctaaccaagatctctttaacggggtctcgaaaaaaggagaatgggatgagaaggatatatgggtagtgtcattttttaacttgcagatttcatcctagtcttccagttatcgtttcctagcactccatgttcccaagatagtgtcaccaccccaaggactctctctcattttctttgcctgggccctctttctactgaggagtcgtggccttccatcagtagaagccggatgttcttgtgtccgaaattggtgggttcttggtctcactgacttcaagaatgaagttgcggaccctcacggtgagtggtacagttcttaaagatgatgtgtccagagtttgttccttctgatgttcggacgtgttcagagttacctccttctggtggattcgtggtctcgctggcttcaggagtgaagctgcagacctttgcggtgagtgttacagctcttaaggcggcatgtctggagtttgttcgttcctcccgtctggagttgttcattcctcctggtgggttcgtggtctcgctggcttcaggagtgaagctgcagacctctgcggtcggtgttaccagcagataaatgctatgcggacccaaagagtgagcagcagcaagatttattgcaaagagcacaagaacaaagcttccacagcgtggaaggagaccagagcgggttgctgctgctggctcaggcagcctgcatttttttttttttttttttttttttttgagatggagtctccctctgtcacccaggctggaatgcagtggtgcaatctgggctcactgcaagctccgcctcccgggttcacgccattctcctgcctcaacctccccagtagaggggattacaggcacccaccaccgcacccagctaatattttgtctttttagtagagtcggggtttcactgtgttagccaggatggtctcgatctcttgacctcgtgatccacccctctaggcctcccaaattgctgggattacaggtgtgagccactggcacccagcggggcagcctgcttttattcccttatctgaccccacccacatcctgttgattggtccattttacagagagctaattggtccgttttgacagggtgctgattggtgcatttacaatccctgagctagatatacacagagtgctgattggtgcatttacaatcctctagctagacataaaaattctccaagtccccactacatttgctagacacagagcactgattggtgcgtttacaaacctttagctagacacagagtgctgattggtgcatttgcaaaccttgagctagacacagagcactgattggtgcatttacaatcctttagctagacacagaagttctccaagtgcccaccagattagctagatacagagtgctgattggtgcatccccaaaccccaagctagacacagagtgctgactggtgcatataaaatcctcaggctagacataaaagttttccaagtccccatctgactcaggagcccagctggcttcacctagtggatcctgcgcagggctgtgccgggcgcctgcactcctctcagcccttgggcagtcgatgggaccgggcgctgaggagcagggggcggtgcccgtcggggaggctcaggccacgctggagctcacaggggttgggagggggctcgggcatggcgggctgcaggtcctgagccttgccctgtgcagggcggctggggcccggtgagaattcaagcggggtgcaggcgggccggcagtgctgggggacccggcgcaccctctgcagctgctggcccgggtgctaggcccctgactgcccggggccgggggtgcggggcccgctgagcccgcgcccacctggaactcgcgctggctggcgagcgctgcgcgcagccccagttcccacacccgcctctccctccacacttccccgcaagcagagggagccggctctggcttcggccagcccagagaggggcccccacagcgcagtggcgggctgaagggctcctccagcacggccagaatggacgccaaggccgaggaggcgccgagagcgagcgagggctgctagcacgttgtcacctcgcattctgaaccacagactctccaactctccggcgcttttcgcccactcggtccctcagaacacgaagggctctctcatcctgtcactaaaacgattagctgtccggagacacggaaaaagtcgcccctcttctttgcaggattcctcccttgaacttctccaaaccctcttagtgtgacgtgaccccacccctagctaacccaggctgcttccttaccagcttcccgccccctggggaggcggcaatgcaaagaccgtccgctgccagctctgccgctatctctgtggggtgaatctaacatggcggacaaagacagtaactagtcccgtttctccgcgttttcgccaagaagattggctcttaccacttgtccctcaaaacgaccaccccattgactggtggcgattgcgtcgacggagacggggcaaaagcaagctgaacccgaaaaataacaaacactggggctgaggggtggaactacgagtgcgcagacatgggccagagcgcatttcccctgccccaggcaaattcggcgctcactgcgtccccgcaggccactgaccttacaagactacttgccccagactcctggggctggatgggaattgtagtctccctaaagagttgtacgtatctttttaaggcctagtttctgctttcaaaatacgaaaacataacactccagtccataactgttgacaagtacaagcgcgcacaggtctccaatctatccactggatttccgtgagaattgtgcccgctctggtattggatgttcctctccataagactacagtttctaaggaacactgtggcgaagacctttcattccgcaacgcatgctggaaataattatttccctccacccccccaacaatccttattacttatatttaccgaaactggagacctccattagggcggaaagagtgggggattgggacctcttcttacgactgctttggacaataggtagcgattctgaccttcgtacagcaattactgtgatgcaataagccgcaactggaagagtagaggctagagggcaggcactttatggcaaactcaggtagaattcttcctcttccgtctctttccttttacgtcatccgggggcagactgggtggccaatccagagccccgagagacgcttggctctttctgtccctcccatcctctgattgtaccttgatttcgtattctgagaggctgctgcttagcggtagccccttggtttccgtggcaacggaaaagcgcgggaattacagataaattaaaactgcgactgcgcggcgtgagctcgctgagacttcctggacgggggacaggctgtggggtttctcagataactgggcccctgcgctcaggaggccttcaccctctgctctgggtaaaggtagtagagtcccgggaaagggacagggggcccaagtgatgctctggggtactggcgtgggagagtggatttccgaagctgacagatgggtattctttgacggggggtaggggcggaacctgagaggcgtaaggcgttgtgaaccctggggaggggggcagtttgtaggtcgcgagggaagcgctgaggatcaggaagggggcactgagtgtccgtgggggaatcctcgtgataggaactggaatatgccttgagggggacactatgtctttaaaaacgtcggctggtcatgaggtcaggagttccagaccagcctgaccaacgtggtgaaactccgtctctactaaaaatacaaaaattagccgggcgtggtgccgctccagctactcaggaggctgaggcaggagaatcgctagaacccgggaggcggaggttgcagtgagccgagatcgcgccattgcactccagcctgggcgacagagcgagactgtctcaaaacaaaacaaaacaaaacaaaacaaaaaacaccggctggtatgtatgagaggatgggaccttgtggaagaagaggtgccaggaatatgtctgggaaggggaggagacaggattttgtgggagggagaacttaagaactggatccatttgcgccattgagaaagcgcaagagggaagtagaggagcgtcagtagtaacagatgctgccggcagggatgtgcttgaggaggatccagagatgagagcaggtcactgggaaaggttaggggcggggaggccttgattggtgttggtttggtcgttgttgattttggttttatgcaagaaaaagaaaacaaccagaaacattggagaaagctaaggctaccaccacctacccggtcagtcactcctctgtagctttctctttcttggagaaaggaaaagacccaaggggttggcagcaatatgtgaaaaaattcagaatttatgttgtctaattacaaaaagcaacttctagaatctttaaaaataaaggacgttgtcattagttctttggtttgtattattctaaaaccttccaaatcttaaatttactttattttaaaatgataaaatgaagttgtcattttataaaccttttaaaaagatatatatatatgtttttctaatgtgttaaagt

SEQ ID NO: 40 - DNA, 1630 bp, Homo Sapiens
gagctcgagccacgccatgcccgctgcacgtgccagcttgcgcagcacatcagggcgctggtctctccccttcctcctggagtgaaatacaccaaagggcgcggtgggggtggggggtgacgggaggaaggaggtgaagaaacgccaccagatcgtatctcctgtaaagacagccttgactcaaggatgcgttagagcacgtgtcagggccgaccgtgctggcggacttcaccgcagtcggctcccagggagaaagcctggcagagtgaggcgcgaaaccggagggtcggcgaggatgcgggcgaaggaccgagcgtggaggcctcatgcctccggggaaaggaaggggtggtggtgtttgcgcagggggagcgagggggagccggacctaatccctcactcgccccctccccctcccgggccatttcctagaaagctgcatcggtgtggccacgctcagcgcagacacctcgggcggcttgtcagcagatgcaggggcgaggaagcgggtttttcctgcgtggccgctgggcgggggaaccgctgggagccctgcccccggcctgcggcggccctagacgctgcaccgcgtcgccccacgggccccgaagagcccccagaaacacgatggtttctgctcgaggatcacattctatccctccagagaagcaccccccttccttcctaatacccacctctccctccctcttcttcctctgcacacactctgcaggggggggcagaagggacgttgttctggtccctttaatcggggctttcgaaacagcttcgaagttatcaggaacacagacttcagggacatgacctttatctctgggtatgcgaggttgctattttctaaaatcaccccctcccttatttttcacttaagggacctatttctaaattgtctgaggtcaccccatcttcagataatctaccctacattcctggatcttaaatacaagggcaggaggattaggatccgttttgaagaagccaaagttggagggtcgtattttggcgtgctacacctacagaatgagtgaaattagagggcagaaataggagtcggtagttttttgtgggttgcctgtccggggcccctggcatgcaggctggatggagggagaggggtggggggtggcgggggaccgcgtttgaagttgggtcgggccagctgctgttctccttaataacgagaggggaaaaggagggagggagggagagattgaaaggaggaggggaggaccgggaggggaggaaaggggaggaggaaccagagcggggaggcgcggggagagggaggagagctaactgcccagccagcttgcgtcaccgcttcagagcggagaagagcgagcaggggagagcgagaccagttttaaggggaggaccggtgcgagtgaggcagccccgaggctctgctcgcccaccacccaatcctcgcctcccttctgctccaccttctctctctgccctcacctctcccccgaaaaccccctatttagccaaaggaaggaggtcaggggaacgctctcccctccccttccaaaaaacaaaaacagaaaaacccttttccaggccggggaaagcaggagggagaggggccgccgggctggccatggag

SEQ ID NO: 41 - DNA, 2501 bp, Homo Sapiens
ttaacaaaattgtttaataaaatttataaaaatgcatctttgagaatacttttctcagcttgaattgttttccttttccacccccaaagaaaatacacaattatcagcacccacacatgtatacactcaaaactacagtgacattctctacacagaactatattcgatatagcttgaactgccgaaaaatcaagacaattccaaaaagtgattgcagggttgatttttttctccaaaacacttgagaaacagtaaagctatttcaacaaaagtcttttctttgattgtcaaaagttgaaattcacatttaaataaaaagagatccaaatcaagatcctcactaccccctacccctcaactaaccccctttagggccacattttcttcttgctcctaagaaaaaaatttggaattttgaatattctcggttttctgtgcacacctggaattgggcaaatgtgttcagctcagccagcattttctgtagacatcatcaaaagcaggcacttggggattctgggctttgagtacaaaccacggatcttgtgtcagaaacacatgttgagactcctccattccttccagaattttcagagatgaggtagacccacctcaatcatcctcagcatcagtttgctaaattgccaggctcaatgacaagctctcctgccatctccaagcccacttttcatagttccgctctgtctttggctgcagcactttaggcactattctaagtcctggagtatatcactcttgcttcagagctaaataaacattaatgaacacacttactcagaacaagtcactggatagctgcccattgcaagttacatactcaggagatgaaagagggaagccattaaaggtcttcagagtagacaatacctagtcaagatgtggccagacaaagacacaaacttcttaccctaaaagagcccaataatttctgcatcagagaactcctatcttgggcaaagcaactgaattcaggagtgagagttgatattaaaacatggaggctgggcacagcagctcatgcccacaatcccagcactttggggggccaaggcagaaggattgcttgaggccaggagtttaagaccagcttgggcaacatagcaagaccccatctgtacaaaaaaataaaaaggaggctggtgggagaactgcttgagccccagagtttgaggttacagtgagctatgatcacatcactgcatcccaggcctgggcgatggagcgaaactgtctcttaaaaaatggcagggagttggggagctgggcaggtgcagtggctcatgtctgtaatcccaatactctgggaggccaagatgggaggatcacttgagcccaggagtttgagaccagcctgggtaacacagggagaccccgtctcaaatatttaaaaaattagtcatgcgtagtggtgcatgcctgtggtcccagctacttgggaggctgaggtgcaaggatagcttgagcctgggaggacaaggctgcagtgagctgtgattgcaccactgcactccagcctggccgatagaatgagaccctgtcttaaaaaaaaaaaaaaggcagagggacacaccagtgtagtaatgagcagaagcacacaaattttttttaaaaaattatatacacaaaacaacagaactagagtagctgacttctccccttctttttaaaagtgagacaaaattccttaagaaaatctgcaaggtgctgggtgaaccttctgatgctaaagttgttcttctggaatattaaaatttgggtatcttttggacatcaccaccatgtaaagagtgatgggaaaaaaaaaaaagctttaagaaataagtcgaaacttttctaacacaaacttattagagctataaagtggagagagtataaagctatactaactgcatcactaaccagtctcttttttttccccagaaactcatctcaagggaagggagctgaaaaaccaccagcaacgtgatttctgcatttcccagcacatgggtctggggcccgcctctctcgagtcccctagtcgtcctcgccgcctccgtacatgtcagccagcttcttgaagcgattgccccattcgttcaagtagtcatagtcctggtctttgtctgactctgaggagttcagggagctcagactagcagcttcggaaccgcttccttcatagtcaaacacgagcagagaatcataaggcggggctgtggggtcagtatcagccgctttcagattctaaagaagaagggacaaaagcatcttttagtgaaaggaagggcacacctgtcatctggggcaagaagtctagcaatatgtaaggtacgacaatgcacccagacttgtggcacaccacggagcagtgaacaccaacaacgtacatttatacacactgtcatggaaggatgcagaagcacaggatatgttgttgatggaaagagaaagtgaaatggtgagttatatgtaggcaggagagatgcaagcaccaacca

SEQ ID NO: 42 - DNA, 2501 bp, Homo Sapiens
ggcccatcttccctattccttcccacacatgaataaggtattccatggcaggaactttgctcacatctgtccactctccatatcagcaccactgccttcattttgtacagccatctttgatgcaacactgaactcgttggaactgggtctcttggcctctcttcctgcccttctttaaatcacttgctataacccagatctgccaaattataatcattgtattgggtcctctggattcttaaaaagtaccctgtgggccgggtacagtggctcacgcctgtaatcccagttctttgggaggcctgaggtcgggagttcgagaccagtctggccaacatggtgaaacccccatctctactaaaaatacaaaaattagccaggcatgatggcatgcatctgtaatcccagctacccaggaggctgagacaggagaatcactggaacccgggaggcagaggctgcagtcagccaagatcgcgccactgcactccagtctggatgacagagcaagactctgttaaaaaaaaaaaaaaaaaaaaagcaccctgtgtgattctgatgcaccccaatccttgagaagcactcctcttcactggaagcagagcacacacctgatcttgactctctccacacaacaaatcgtccagggctaccagaaagcaccataacttactggcttttcccaacttgtttcccagagacattttcagcctcatttccacccttcccttctagatccccaccattctagattcccaccatccctgccccgttttaagtttgcctctattcacctaaaaacatatggactattccatatggactgagcatgaaagaaatatagttcctcaaagtaaattaaggagctgttttcagaggaaaggaaatggatggtggataggcaagaaaatgtggcccactagaattctatatggtgctgcatattgtgctgtatacatatatggtgcatgcgtatgtgtacatatgtgtacatgtatacattacatgcacatataccatatgtgtgtatatggtgctgtaggtatatacatgcgcatgtatacaccatatacatgcgcatgtatacaccatatacatgcgcatgtatacaccatatacatgcgcatgtatacaccatatacatgcgcatgtatacaccatatacatgcgcatgtatacaccatatacatgcgcatgtatacaccatatacatgcgcatgtatacaccatatacatgcgcatgtatacaccatatacatgcgcatgtatacaccatatacatgcgcatgtatccatgcgcatgcataggcatgtatatatatgtatatgtatacacgtatatggtatatacatgtacatgtatatgtatacacgtatatgtatatacatatacgtgtatatgtatacacgtatatggtatatacatgtacatgtatatgcatacacgtatatggtatatacatgtacatgtatatgcacatcgttaattctcattccctgaatctgttttgctatttagccctcatccctgtgcctttgaatagcctataatgtcttccacattcttaagggccttctcatctcctacttatcttcaatacccagctcaaatattgactctgtgcagctctcctcaatggtcctgagcaccctgtggttctgctcagtcacccacacatgccaggattagatcacttccctcaaatgtcactctgccagatctgactcttcactccactgagaaggcactcaagtgtgcacactcagagcttagcacctgcctggaacacgcgagttcgtcaaggacatgtcttgattgagtgaagtccatcagcacaaagtcacttgggcacaggcatcttgctgtgggataaaacgtaacatttgtgaactctgggttgggaaactatgtggtaattcacacttaataggtcagagatatctcagagataagctgcccaacctactcatgctccttctgttgtttcgtttgtttcccagtgaccttcagtgactgtaagggaaacgacaagctacgctatgaggtctcaagcccatacttcaaggtgaacagcgatggcggcttagttgctctgagaaacataactgcagtgggcaaaactctgttcgtccatgcacggaccccccatgcggaagatatggcagaactcgtgattgtcggggggaaagacatccagggctccttgcaggtaacacatctgtttgagataacttgggttcaaggaggacattaggttctgtctgtcttatgtggaaaatgggtctttaatttattatgttggctaagattccttttgttattgttgttgcaaatgacagaaatccaactcaaaaaatgtagatgaggggcagcgggaattaattgattcatgtaactaattgaggcatagttcgtggattaattcatggaactattttagggatacttctgccttcaggcgtggctgaagctgtccaaatcagctttaatccctgtgcat

SEQ ID NO: 43 - DNA, 8666 bp, Homo Sapiens
ctgcagggctttctttagtttaaagaaagtaatcaggtgtccctactgtgtcatgatctccaccctcagctgggttctccagtctggttttaaagaacaaaacaaaaggcttctctgtctgagtcttactcaacccatcctctctactcataagaggtattccaaacctttacgattctcaaacttcctaaccgaccatcttattttcactctgcaaacaagctaacctcctcattcatagaaggaagtgcctcaacttcctccccgttctgaccttttctccctcccaaatctatgtatctcttgtgacaaaatctataaccaccgctgtactttgagttctatttcttcattatttttgagggacctcaagtcctcaaaaatatcctatcttgcctgtgtacttaacttttcttttattcttttctaactttcccttctcttcacttggcacttgcccttccaggtatatgtgtgctcaggtctcctccaccttccatctgcctcacttcatggcatagggccttgaactatcacaaccaagctatgaaagagtagtcaacgcagtgtccccacttccttgccatcccattatcctagtttttcttttggctctctgaggagtccttcacaggctggttttcaggaataagtctaaatgaattactttcagttttcctaaacttctatgcctttgcacatcctcttacctctgcctagaatatctttctccttcttttccatctttaaactctcacatcattcttcaagactgggatcagctctcagcatccggaagcctttgcctactagagacaaatgagaatgagtttggtcaccttttcattttcttgtatcattctgtgctttattttgctcttctaagagcattacatgcttcatttaatccctaaacaactgtttgaggcaagtacagttattatcctaatcatgcaaatgagaaaacagaggcccagacatgttgagtaactttgataaaagttaaagaaccaataagtggaacagttgaggtttgaaccctggcagtctgactgtagagatactatgtttgacctactcccctctgcccccaccccatgtctgcccttagtttctgagcttgttgaatgaatgaacaggtggtagtctttttttgttataagactgatcagaattaagacaggtttaaatttcacgtgtagaattttcaaaactgcaaaggcagtgcaaatctaaaaaaagaatggcattctcaggaaagaggaaaagtaagtgtgagaataataataacaataaccaacaaactttagtaaatttagtaaatgtagtaaatttttacattaaaagcttttggacatacattatcatattttatggccacatgaaatatattataatcccattttgcacataggaaatctgagactggcataaggagcacagagatccaggactttatattttcattcttctaggattttgcacctcaggtcgatatgtatgagtaaactgggagtataatgggctctttaacagaaaaactaggaaagttttcccactattattaattatttacataatatttttttaattttattattatttatactttaagttttagagtacatgtgcacaatgtgcaggtttgttacatatgtatacatgtgccatgttggtgtgctgcacccatcaactcatcatttagcattaggtatatctcctaatgctatccctcccccctcccccctacataagatttataatggataatggacttcaatttctagagcaaaatggccccacccaaggatgccataatccttccagagctctactgcaagatatgagatatacatatctaaaacttgttcttggtatttccaaagcagtcaacttttacacctgtttataatgcatccaaatgttgtttttatatggttgcatctcccatcttcttcaccaatagctatatatatttttcacaagagctgaaagagttcttgatgtaggaatccatggtagagtttcagagaaatccctgaattcactgaaagttttatctagaaatacatgtgcaagtgaacacatcttttttaaaaaaaatcattacctactttcttttttgagaagaaggtatttatttcaacagactcttgaaggagcctactcttcccactctcccacccccattaagaaccactgtaggccgggcacgatggctcatgcctgtaatcccagcactttgggaggctaaggtgggtggatcacctgaggtcaggagttcgagacaagcctagccaacatagtgaaaccccgtctctactaataatacaaaaattagctgggtatggcagcatgtgcctgtaatcccagctactcgggaggctgaggcaggagaattgctcgaacccgggaggcggaggttgcagtgaaccgagagagatcgtgcggtgccatttcactccagcctgggcaacagagcgaaactccatctcaaaaaaacacacaaaacaaacaaacaaaaagaaagaaccattgtattagtgatggaaatgtgttccctccctcccatcctggcaaccactttcttcctcctccatcataaaatatcttaaactaaactaaaataattttatttatcgatagtttgaattttccctatcattgctacacagctaattgagaggtaccccgaggaaaatataaatggtacagtaatgcattgtagattttaataacatacttgacatcccaaattgttttcattggcttcattttaaaaactacatgttttaaaatcaagcagacactaaaagtacaagatatactgggtctacaaggtttaagtcaaccagggattgaaatataacttttaaacagagctggattatccagtaggcagattaagcatgtgcttaaggcatcagcaaagtctgagcaatccattttttaaaacgtagtacatgtttttgataagcttaaaaagtagtagtcacaggaaaaattagaacttttacctccttgcgcttgttatactctttagtgctgtttaacttttctttgtaagtgagggtggtggagggtgcccataatcttttcagggagtaagttcttcttggtctttctttctttctttctttctttttttcttgagaccaagtttcgctcttgtctcccaggctggagtgcaatggcgcgatctcggctcactgcaacctccgccttctcctgggttcaagcgattctcctacatcagcctccgagtagctgggattacaggcatgcgccaccaagccccgctaattttgtattttttagtagagacagggtttcgccatgttggtcaggcttgtctcgaactcctggcctcaggtgatccgcctgtctcggcctcccagaatgctgggattatagacgtgagccaccgcatccggactttccttttatgtaatagtgataattctatccaaagcatttttttttttttttgagtcggagtctcattctgtcacccaggctggagggtggtggcgcgatctcggcttactgcaacctctgcctcccgggttcaagcgattctcctgcctcagcctcctgagtagctggaattacacacgtgcgccaccatggccagctaatttttgtatttttagtagagacggggtgtcaccattttggccaagctggcctcgaactcctgacctcaggtgatctgcccgcctcggcttcccaaagtgctgggattacaggtgtgagccaccgcgtcctgctccaaagcattttctttctatgcctcaaaacaagattgcaagccagtcctcaaagcggataattcaagagctaacaggtattagcttaggatgtgtggcactgttcttaaggcttatatgtattaatacatcatttaaactcacaacaacccctataaagcagggggcactcatattcccttccccctttataattacgaaaaatgcaaggtattttcagtaggaaagagaaatgtgagaagtgtgaaggagacaggacagtatttgaagctggtctttggatcactgtgcaactctgcttctagaacactgagcactttttctggtctaggaattatgactttgagaatggagtccgtccttccaatgactccctccccattttcctatctgcctacaggcagaattctcccccgtccgtattaaataaacctcatcttttcagagtctgctcttataccaggcaatgtacacgtctgagaaacccttgccccagacagccgttttacacgcaggaggggaaggggaggggaaggagagagcagtccgactctccaaaaggaatcctttgaactagggtttctgacttagtgaaccccgcgctcctgaaaatcaagggttgagggggtagggggacactttctagtcgtacaggtgatttcgattctcggtggggctctcacaactaggaaagaatagttttgctttttcttatgattaaaagaagaagccatactttccctatgacaccaaacaccccgattcaatttggcagttaggaaggttgtatcgcggaggaaggaaacggggcgggggcggatttctttttaacagagtgaacgcactcaaacacgcctttgctggcaggcgggggagcgcggctgggagcagggaggccggagggcggtgtggggggcaggtggggaggagcccagtcctccttccttgccaacgctggctctggcgagggctgcttccggctggtgcccccgggggagacccaacctggggcgacttcaggggtgccacattcgctaagtgctcggagttaatagcacctcctccgagcactcgctcacggcgtccccttgcctggaaagataccgcggtccctccagaggatttgagggacagggtcggagggggctcttccgccagcaccggaggaagaaagaggaggggctggctggtcaccagagggtggggcggaccgcgtgcgctcggcggctgcggagagggggagagcaggcagcgggcggcggggagcagcatggagccggcggcggggagcagcatggagccttcggctgactggctggccacggccgcggcccggggtcgggtagaggaggtgcgggcgctgctggaggcgggggcgctgcccaacgcaccgaatagttacggtcggaggccgatccaggtgggtagagggtctgcagcgggagcaggggatggcgggcgactctggaggacgaagtttgcaggggaattggaatcaggtagcgcttcgattctccggaaaaaggggaggcttcctggggagttttcagaaggggtttgtaatcacagacctcctcctggcgacgccctgggggcttgggaagccaaggaagaggaatgaggagccacgcgcgtacagatctctcgaatgctgagaagatctgaaggggggaacatatttgtattagatggaagtatgctctttatcagatacaaaatttacgaacgtttgggataaaaagggagtcttaaagaaatgtaagatgtgctgggactacttagcctccaattcacagatacctggatggagcttatctttcttactaggagggattatcagtggaaatctgtggtgtatgttggaataaatatcgaatataaattttgatcgaaattattcagaagcggccgggcgcggtgcctcacgccttgtaatcccttcactttgggagatcaaggcggggggaatcacctgaggtcgggagttcgagaccagcctggccaacaggtgaaacctcgcctctactaaaaatacaaaaagtagccgggggtggtggcaggcgcctgtaatcccagctactcgggaggttgaggcaggagaatcgcttgaacccgggaggctgaggttgtagtgaacagcgagatggagccacttcactccagcctgggtgacagagtgagactttgtcgaaagaaagaaagagagaaagagagagagaaaaattattcagaagcaactacatattgtgtttatttttaactgagtagggcaaataaatatatgtttgctgtaggaacttaggaaataatgagccacattcatgtgatcattccagaggtaatatgtagttaccattttgggaatatctgctaacatttttgctcttttactatctttagcttacttgatatagtttatttgtgataagagttttcaattcctcatttttgaacagaggtgtttctcctctccctactcctgttttgtgagggagttaggggaggatttaaaagtaattaatacatgggtaacttagcatctctaaaattttgccaacagcttgaacccgggagtttggctttgtagtcctacaatatcttagaagagaccttatttgtttaaaaacaaaaaggaaaaagaaaagtggatagttttgacaatttttaatggagaagggagaagaacatgtagaaaaggggaaatgatgttggcttagaatcctaactacattggtgtttaatataggaacatttatttatataacattttaaagtactaaattcatattagtatattatcaaatggatatattatcaaatgggtttaagcatcctacacattttaattcaattgattcattttctttttgctttggatttctatcatgatttaaatatttacatatgggttactttttagatttttcatactatgaaatataagaaaaacctttaaggctagttttatgaccaagacgaaggacttcattgaatacacaaaacaataaatatactgcaacattttgtctttctttttgtagctgcaatttggtttgcttatactttctctttgtctctttgaaaactgagtcagtttcactttctcaggacaggatttaataaccataatataatttagtataattccttgatttaggcaaattatgcaatttgtgtttagtatgaaatgtacctaaaaataagtaactcctctttaacaccaccatcctcaaactaatataacaaataacagttatcctaaaataaattgtctacttccaccatgcagcactcaaattttaaggttgctatgactgcagacagtattttaaaattcctctctggaaatggctttgtttccaagatgatttaggaaccaaagaggtgaccatctcttgtttaatgaactctcaaatcataaacctgggaagtgttttagtttcctactgctgctgttacaaattatcacaaatgtgttagctaaaacaaacacaaaattattattttacagttctagagatcagaagtcaaaaatgggtccacaaggtttcattccttttggaaactctaaggggcaatctgtttccttgtcttttccagcttctagtgaccatcaaattccttggctcatggtctctgtattttctctgtggcctgtgcttccattcttgtatcttctctctgactgtgaccctctaataaaaacacttggggttatgttgggcccaccctgaaaattctggataatctccctcaagaccattaattaaatcacatctgcaaagcctcttttgccacataagttaatgtattaaaagtttttgaggattaggacatagacattgggggtgggggggcattattcagcctaccacaggaaggaattttagggttaattaaactagccttcttattttatacttgaagaaattgaagttttggaattggagagcattatgctaaatgaaataagccaaacacagaaagacaaatatcacatgttctcacttatctgtgaaatataaaacaattacattcttagcagtaaagagtagaatggtggttactagagctggggggtgggaggaatggggagatggtaatcaagatataaagcctcagttaagatgggaggaataagtttgattgttttttttgagatgtgtttcatagcatgatgaatatagctaaatagtaaatcccaaatgctctcatttgacaaaaatgtcaaatatttgagatgatggataggttacttagcttgacttaataattccccattgtgttcaaagatcataacttcatattgtaccacataaatatatacaactgtactatcccaatatataattttaaaactaatataatgaaaaagaaattgaagttcaacattcccagaagctaagtgtaacttaaaagttttgtgagaatttgttttaacaaacaaacaagttttctctttttaacaattaccacattctgcgcttggatatacagcagtgaacaaaaaaaaaaaaaaaaaaaaaaatctccaggcctaacataatttcaggaagaaatttcagtagttgtatctcaggggaaatacaggaagttagcctggagtaaaagtcagtctgtccctgcccctttgctattttgcccgtgcctcacagtgctctctgcctgtgacgacagctccgcagaagttcggaggatataatggaattcattgtgtactgaagaatggatagagaactcaagaaggaaattggaaactggaagcaaatgtaggggtaattagacacctggggcttgtgtgggggtctgcttggcggtgagggggctctacacaagcttcctttccgtcatgccggcccccaccctggctctgaccattctgttctctctggcagg

SEQ ID NO: 44 - DNA, 4101 bp, Homo Sapiens
cccctcactccccactgccattcatccagcgctgtgcagtagcccagctgcgtgtctgccgggaggggctgccaagtgccctgcctactggctgcttcccgaatccctgccattccacgcacaaacacatccacacactctctctgcctagttcacacactgagccactcgcacatgcgagcacattccttccttccttctcactctctcggcccttgacttctacaagcccatggaacatttctggaaagacgttcttgatccagcagggtaggcttgttttgatttctctctctgtagctttagcattttgagaaagcaacttacctttctggctagtgtctgtatcctagcagggagatgaggattgctgttctccatgggggtatgtgtgtgtctcctttttctttcaggacttgtaggattctttgtgccatttgcatataatttggcaggttcacattttttaagagccctatgaagtgctttttgcatgtgttttaaaaaggcatttgaaaattgaaagtgtgatttatggaaattaaatcatctgtaaaaaattgctttggaaagtaatgattgctggccataaagggaaatatctgcgatgcacctaatgtgtttttaaccctttatttgctgacaatctatagtcattaatgctaaactcgattttggcttcagctacatttgcatattgtccaacaatggtctatttttgtaagaattagataaaatgtatacttgatataaaatagtcaaaaatgtaactcttagtaacagtaagcttggcatttagatagaccatgaacacttcgtcagatactctgttgggtgtttgggatagcaattaaaacaaagtattgatagttgtatcagagtctattaggctgcagcaaaggaagtttattcaaaagtataaactatccaagattatagacgcatgatatacttcacctattttttgtctccttaatatgtatatatatatatatatatatatatatacacatatatgtgtgtgtgtatgtgcgtgtgcatgtttaacttttaattcagttaaaaacttttttctatttgtttttcatctggatatttgattctgcatatcctagcccaagtgaaccgagaagatcgagttgtaggactaaaggatagacatgcagaaatgcattttaaaaatctgttagctggaccagaccgacaatgtaacataattgccaaagctttggttcgtgacctgaggttatgtttggtatgaaaaggtcacattttatattcagttttctgaagttttggttgcataaccaacctgtggaaggcatgaacacccatgtgcgccctaaccaaaggtttttctgaatcatccttcacatgagaattcctaatgggaccaagtacagtactgtggtccaacataaacacacaagtcaggctgagagaatctcagaaggttgtggaagggtctatctactttgggagcattttgcagaggaagaaactgaggtcctggcaggttgcattctcctgatggcaaaatgcagctcttcctatatgtataccctgaatctccgcccccttcccctcagatgccccctgtcagttcccccagctgctaaatatagctgtctgtggctggctgcgtatgcaaccgcacaccccattctatctgccctatctcggttacagtgtagtcctccccagggtcatcctatgtacacactacgtatttctagccaacgaggagggggaatcaaacagaaagagagacaaacagagatatatcggagtctggcacggggcacataaggcagcacattagagaaagccggcccctggatccgtctttcgcgtttattttaagcccagtcttccctgggccacctttagcagatcctcgtgcgcccccgccccctggccgtgaaactcagcctctatccagcagcgacgacaagtaaagtaaagttcagggaagctgctctttgggatcgctccaaatcgagttgtgcctggagtgatgtttaagccaatgtcagggcaaggcaacagtccctggccgtcctccagcacctttgtaatgcatatgagctcgggagaccagtacttaaagttggaggcccgggagcccaggagctggcggagggcgttcgtcctgggactgcacttgctcccgtcgggtcgcccggcttcaccggacccgcaggctcccggggcagggccggggccagagctcgcgtgtcggcgggacatgcgctgcgtcgcctctaacctcgggctgtgctctttttccaggtggcccgccggtttctgagccttctgccctgcggggacacggtctgcaccctgcccgcggccacggaccatgaccatgaccctccacaccaaagcatctgggatggccctactgcatcagatccaagggaacgagctggagcccctgaaccgtccgcagctcaagatccccctggagcggcccctgggcgaggtgtacctggacagcagcaagcccgccgtgtacaactaccccgagggcgccgcctacgagttcaacgccgcggccgccgccaacgcgcaggtctacggtcagaccggcctcccctacggccccgggtctgaggctgcggcgttcggctccaacggcctggggggtttccccccactcaacagcgtgtctccgagcccgctgatgctactgcacccgccgccgcagctgtcgcctttcctgcagccccacggccagcaggtgccctactacctggagaacgagcccagcggctacacggtgcgcgaggccggcccgccggcattctacaggtacccgcgcccgcgccgcccgtcggggtggccgccgcgcccggcaggagggagggagggagggagggagaagggagagcctagggagctgcgggagccgcgggacgcgcgacccgagggtgcgcgcagggagcccggggcgcgcggcccagcccgggggttctgcgtgcagcccgcgctgcgttcagagtcaagttctctcgccgggcagctgaaaaaaacgtactctccacccacttaccgtccgtgcgagaggcagacccgaaagcccgggcttcctaacaaaacacacgttggaaaaccagacaaagcagcagttatttgtgggggaaaacacctccaggcaaataaacacggggcgctttgagtcacttgggaaggtctcgctcttggcatttaaagttgggggtgtttggagttagcagagctcagcagagttttatttatccttttaatgtttttgtttaatgtgctccccaaatttcctttcatctagactatttgattggaaatatgtcagctatgatgatgactttctgggaagcgattcctgtcacccgctttcccctcctccccaccccacgtcctggggctttagagagcgattgggagttgaatgggtctgatttcggagttagctggctgagtccgcgctggagcggattgctggcatgtgacttctgacagccggaaatttgtaggtgtcccgcgagtttaaaacaagccatatggaagcacaagtgcttaaaaataatctcctgccagcccagtgacaagcctgtcccacccggggagaatgccccggagtggcgtgcgggtcagccagggtctgcgcctcgcagccactgtggaaggagcgcggccggtccaggacacaggagaccactttgtgacttcaatggcgaaggttgtgtgtcctcattttaatttttttccctacaagaattgttctttctccctctcctctccctcccattttctcttgcccagtttctccttttgttttttgttttttgttttcctgatgggcctgcagagggattaggtgggcgcttctggtgaacaccttcctaggtggccacaggacaggtgtaccccggactgggtttggaagcttcagggcgccacatggctgggtcctgaattaggcatttcccaactgtacactggtatccggactggtgtccctatatctttctgccttgtaagccgtggaccagtttttgttcagtattctgtttccagggatatttatagcagaaggaaggggactaaagtgcagtttgg

SEQ ID NO: 45 - DNA, 2501 bp, Homo Sapiens
tacctgtggtcccagctacttgggaggctgaggtgggaggattgcttgagcccaagaggttgaggttgcagtgagctgtgatcgtgccactgcactgcactctagcctgggcaacagagcgagactgtctaaaagaaaattaagtggtcccctattgattgtgtgctataatttttctttttttctctttttagagatgagatcttgctatgttagccaggttgatcttgaactcctggcctcaagcattcctcccacctcggcttcccaaagtactaggattacaggtgtgagccactgcacctggccaattatgtgctatgattgttaaaagcaaatatacacatacagtgttgatttttaaaattttcttttcaggagaagaagaaaaagaaacatagagataggaagtcatctgactctgacagctcagactctgagagtgatacaggcaagagggcaaggcacacatcaaaagacagcaaggcagcaaagaagaagaaaaagaagaagaagcacaagaagaagcacaaggagtgagagtataaagagtgtagggggtggttgagagtaagaaaccaggagccttgtgccttgagactcctggaaagactcaatagtgagaatatagcctcccaccccattaacttcgctcccatgggagatggcttcccctcatgcaacaggcaggtttgggagttagaggtcaaaagcagctgcctgaatgagttgttgtttccttatcactcctggtccctttgcaagtgaaccctgcagctcacccattcattcacccaacttccttcattcagcaggaggtcctattaccctctccagctgccactgccagagctggattcctgtaaaggagtccaggctagagccacagagactgttgtggaggtgagttcggctgtagttagagtgattggacccttcctattggtctgtcctgggccaactggtgggtgatctctgctgcatccaacatgggagcagagactggcagcaggaggggggaacatggtgagaagtggtgctcacttttcccattcctcctaacatagttctactatgctagaagtggcatccagcggccacagctagaaaacagtctgcagtgtgacttaacttgtgtattgcattccagcagaccactgaaccagacagcgaagccaagatcattgttctactttgtatttactactgtgtgaatcagttgattctacttcaggtccttgcttaaattcctgtcactaaatggaaatgtgtttggttttaaacttactgagttatttttcctataatccttcttcctgggtaacttacagacttaaagtcactgagcctgcattagctgacaaaaacatttaatatgttaccttagaccttggagagatgcccagcagaggtacagagccaaaggcactagcagatcactgccttcttgggagatcacttataagccctcccttttgtaatgatcagatgccctcttccctcagagttgattagagaagcagtaagaatttgtagtcataagtactagcctggtgcacaggtcagcagtcctcttggccagtggtcattttctcccaccaccatggtacaagcctgggttctgtgccctgaacctgaattctggaaagggagagactacagcatttcacagagaacagccagacccaagagctttcagtgtaggatgggcctgaagtgacagttcaatagccaaacctggggaagccccatcactgactgaactaggtcatttgaccatggagggggggcagtgtaaaggcaacgtgtaggtacagctcttttattattaaatgtgtaaggtgatcagctgattaacaggctccgagactgtccatttcagtctcccatccagtgcttcttcctcagtaaccttcaggccgttatttctgcccactctctgacacacaggataaaccaagactcccagagttatgttaccaaaggcaaaaaggcaactgggtggccttggctctgctttattgacctcagagcaccctatgagtgcagttaaaaaaaaaaaaaaaaaaccacatacaccatgggaactggaactggatcccggtcagtggcacctgaccccagaagaattcgtggatttgtacaaaatgcagaggaagaaatgaggcaatgtggtgctgagtcgaggggtagccgattggcagagtagtagtcagcaacagtgcagtcaggtcatgcctctttctcataagtgcgagtgcaaactgcagtgccgtgggtgagtgtctggaaggaaagacagagtgagatggggggtggagccaggaacaccattgcgagcattctaccctcccttcctcctgataattgtcacttgagtacctactatgtgccggctatatgtatgtatgtgtgtgtgtgtgtgtgtgtgtgtgtgtgtgtgtgtatacatacataattttttttttctgatatgcacagcaaatccttaagataggcat

SEQ ID NO: 46 - DNA, 2501 bp, Homo Sapiens
tagaaaaagcattctaagacaaaactcctacaattcagcaagccttgggaaaaaggctaaagctttctagcctctacctgaaaatacccactgcatagaaaacccaggagaaaaaattcaacctaggcagtcaagtctgaggtattgtcaccccatttaaatttgaacagggcactctaaaatgacatactggccttcataagaggaacagaaagaggtttgtagtcatgcccataggcctatgttcttaggtaaactaaactagcttgatccttaaaaaacgagagagagatggtgaacagtggaaaaggttcaaaataaaatatgaaagacagcctctgttatagcacttgccatatccccccaggcaactgagtgcagagctgacaaacttatgacatgggagaatgaaataagctttctagaatgcaaggatctgagtacaacaccatatttgaacaacaatagggggcaaggtagtctgggtctttaactatttagaatactctaaaaagagggctggggagagaaaggccaagtgcacatatatttaaagctatccagtaaagacttacttacatttcaaggtgaaatcagaatacaatgaatgtgttttctagctaaaaatcatgatcactaagtggttgatacaattttttccaatcaattgctaacagcatttattcactaattttgttttttatttgtgtctgatctacttctgcaacttataacatgaacatatttattcacaggtcagatgaagaattgcctaattttaatttggaattatctaattctaaaaacaaaaaagaaactatttataggagaggatctgtaactggggtccatgggagtttattaacaggtttgccagaaaaaaatacaagataccagttaaatttgaatttcagataaacaagtaatttttttagtctagatatatgccagtattgcatggtaaccctatatttataaacaaatttcagagagatagatacatttctctctctctctctcctgtttttttgaaactgagtcttgctctgtcacccaggctggaatgcagtggcatgatctcagctcactgcaacctctgcctcccaggttcaagcagttctcctgcctcagcttcccaagtagttgggattataggcatgagccactgtacctggccttctttaacactttttgtttacaggccaaacatcaccctcagtcattccagcagtctactatgtgaactgagactaggagggataatatagattgccagatagatctaggcatgagctcgttagacactgcataaaaatttggagtagaagcattttgacaaggaaattggctatagctatctttctaccagagtcttaaacctatgatctctcaacagttagtcatcattaagacaaagattaattctatcaagccttgacttttccctgtggcctgagcttcctaggagccgaacataaagggaaacatgaagggcaatttaccaaatagcaactgaagagaagagtccactcagtgaaagcagaggagtttgcccgggggcgtgttagggaggcagagaaagctggtttacagggctttgcagacagacttgagcctaagggccatgtcacacctttaagttaagttggggttgaccttttaaacaagaagttgtgcatgacagaaggtctgctttgtgaacattggattctggaggagcaccaccgcaggaaagactggagaaaggtggtggtgggctgggggcactggcttggaagaagagagtgaagaggcaggagagttggaagagactgggaggctgggaatacagtactcaagggccagggttttctcccctccagctctttgtcctttgcagccaccacccaaggatgctggtgaaggtgtttttgtgcatccccattctgagagtgcagcctctttcctgaggcccacgggagggtctgggtaatgacgaaatgcagtctttacctgtgtcactgaaagtagacccgcagagctgcggcttctgctgccatttcctcctctgatctccaagaggcaggaaagtcctccttgtcatgtttctggagctttggagaaaaaaaaaggaagaggctctttcatgggcccttgggatctccttgaacaaatttcggggggctgggggagactgaacaaaatttgcaaattagaggccagtaggtgtatcttttaattgtttcagttgctacaacttgcaaataggctttatacaagaatccacatttaaaataatcagatcatttgccatcttgtaatcatctactgaggctgaggggggtgatgatatgatataggtctgtgtccttgcccatatctcatgtcaaattagaatccccagtgtcagaggtggggcctggtggcaagtgactggaccatcaaggcagaattccccattggtgctgttctcatgatagtgagttattgggggaccttattgtttaaaagtgtgtagcacc

SEQ ID NO: 47 - DNA, 2501 bp, Homo Sapiens
gcagttactccaggctttgtgtaaatgtgcatttttttccagcccccagtttatcaagctttgcttgagtcacttgtatctgaaataccatctgtcactcttccaggttgggatctgtctagtggaaaacagatgacagtcatatgttacttagtgctttactatgtggagaacgtttacataaattatcttatttcattgccactaagccggggaaagattcaggaaacccattttaagatgaggacactgaggtcagggtaagtgagtgagcttttacccacctctcagctgctctctagttgtcaaagaccaacccgtgggggtggctcaggcccgacccctgcagcatattccttggggcctcccaagtgggcccgatctgctcaccccagctgtgactgtcttttgacaggaggagggagcagcgaggctgcacccactgctcataaaaagcagagcttgtccacgccgagggctcggctgggtgggaggccgcttccacaaggctttttcttgctccatacaaagtgcagactgatgctttgagatatagtcaggattatcattttcagagctcaagctctaatttccaggcatgtgaccagacctctctatccattcctacaagtggtcgagagtagcccataattattttggcttggtcttttaatagcttgagagtaataatctacatagcttgtagaagtgaatgtacttattttaaaagttctgtgttttttgatgttgttgttgtttgggacaggatcttgctgtcgcctaggctggagtgcagtggcacaatctcagctcactgcagcatggacctcccaggttcaagcaatcttcccacctcagcctcctgagtagctgagactacaggcacatgttaccacgcctgcctggctaacatttttattttttatagaaacaatgtctccctatattgcccaggctggttttgaactcctgggctcaagtgatcctctcgtctcagcctcccaaagtgttgggattataggtataagcctctgcacccagcttaaaaaatcctattttcacagtctatgtgcagagcattttggaagtcaggtagaaaccatttcccattttctattacctgggtgatagttgactggtttttgttctttgaaatccattttaaaagtgtatggtcctctatgaaaatacttctaattattgatgtgtgaaatgctttgaaatccttggatggaaatcttgtaccatgaaagaacagaactgttggtggtgtctctgggagaggctcacgagggccgggcaagcctgtgggggtagcaggcagtcactcccatggggacaggctgacctggcaggcttatttcccatggaagtgggcactgaggaataaaaagcagtttcaggccaggtgcggtggcccatgcctgtaatccttgcactttaggagactgaggcagggggatcccttcagcccaggagttcgagaccagactgggcaatatagtgggacctcgtttctacaaaaaatgaaaaaattagtggagtgtggtggcacactccagtggtcccagctacttgggacgctgaggtgggaggatcgcttgagcctgggaggcagaggttgcagtgagccaaggtcatgctatgagtaacattttgaaggtccacttctgggattcatccaggagctaaacgggtcatgtccagccaactcagcattcaccaaggtacgtttccagaccaaacaccacattgtccatagactgatatgcctcaaaaacctggtagaggtgggcacggggttaggtagaaatcatcttcctcccttccttccccaccaaactttctggtgacagaagcttttctgtaactggggcagaatggggtcagacactctggcaacttacccattggtgttatgaaatataaaacattaatgtatttatataaaaagtgatagatgaaattaaaatttgctgttctattaaaaccatattagattttaaattattatagagattatattttaatgttttaaatgtatttgatacattacaaaattattttagttacaagcatatcattaaagctattctttattattacaaaatgcttttacaatgctattcttgacaacaggaaaatacttaccctcactgaaatatgtggagtaccattttttggaaaccatgtcaagcataatggcaatattcaggttcaatcttcctatagatctgctcaatatttatctaaaccttagcttctattcttttcacatgttattagctatattttcacttaaaaaattggaggctgaaggggtaagcaaacaaacttttgaagtagacaaagctcatctttaatcaacagactttagagtccagtctttccaaatctgtttttaacgacagaaacttctccctcccctgccccattttgtcctccccattaaatggtactgtgtcaataaaattcccaagcgacctctttaaatcagcgtt

SEQ ID NO: 48 - DNA, 3201 bp, Homo Sapiens
tcctctttgaaaattgctaataaaaactcgctggttttacggctcagggggcatcacggaacctgcggacatgtgatgtctcccctggacacccggctttaaaatgtctctcttttgtactctttccctttatttctcaggccagccgacacttagggaaaataggaaaggacccacgtgaaatattgggggctgaatttcccccgataataagtctcttaaaaaagacttttaaatgaaatttctttgttttttaacttttatttctgttttgggggtacatgtgaaggtttgttacataagtaaactcgtgtcttcggtgtttgttgtacagaatatttcatcacccaggtattatgccgagtacccaatagttctcttttctgctcctctccttcctcccatcctgcaccctggagtcaaccacagtgtctgttgtttccttgtttgtgttataagttctcatcatttagctcccacttacaagtgagaacatccagtatttggatttctgttcctgcattagtttgctaaggataatagcctctagctccatccatgtcccacaaaagacatgatctagttctttttaatggctgcattaaatgaagttttaaagatacaacataaacaccaacctcttccccaccacaaaaatcccttgctgaatttgattacacttaaattaacgagttttgtttcatgaaagactccttggacaaacttgacagttgatggaataggagaagctgtctgtcatgtctaaagccaacaagagatcaatatctagaataaatggagatctgcaaatcaacagaaagtaggcagcaaagccaaagaaaatagcctaaggcacagccactaaaaggaacgtgatcatgtcctttgcagggacatgggtggagctggaagccgttagcctcagcaaactcacacaggaacagaaaaccagcgagaccgcatggtctcacttataagtgggagctgaacaatgagaacacatggtcacatggcggcgatcaacacacactggtgcctgttgagcggggtgctggggagggagagtaccaggaagaatagctaagggatactgggcttaatacctgggtgatgggatgatctgtacagcaaaccatcatggcgcacacacctatgtaacaaacctgcacatcctctacatgtaccccagaacttcaaataaaagttggacggccaggcgtggtggctcacgcctgtaatcccagcactcttgggaagccgaggcgtgcagatcacctaaggtcaggagttcgagaccagcccggccaacatggtgaaaccccgtctctactaaaaatacaaaaatcagccagatgtggcacgccacctataattccacctactcgggaggctgaagcagaattgcttgaacccgagagcggaggttgcagtgagccgccgagatcgcgccactgcactccagcctgggccacagcgtgagactacgtcataaaataaaataaaataacacaaaataaaataaaataaaataaaataaaataaaataaaataaaataaaataaaaaaataaaataaaataaaataaaataaaataaagcaatttcctttcctctaagcggcctccacccctctcccctgccctgtgaagcgggtgtgcaagctccgggatcgcagcggtcttagggaatttccccccgcgatgtcccggcgcgccagttcgctgcgcacacttcgctgcggtcctcttcctgctgtctgtttactccctaggccccgctgggacctgggaaagagggaaaggcttccccggccagctgcgcggcgactccggggactccagggcgcccctctgcggccgacgcccggggtgcagcggccgccggggctggggccggcgggagtccgcgggaccctccagaagagcggccggcgccgtgactcagcactggggcggagcggggcgggaccacccttataaggctcggaggccgcgaggcttcgctggagtttcgccgccgcagtcttcgccaccagtgagtacgcgcggcccgcgtccccggggatggggctcagagctcccagcatggggccaacccgcagcatcaggcccgggctcccggcaggctcctcgcccacctcgagacccgggacgggggcctaggggacccaggacgtccccagtgccgttagcggctttcagggggcccggagcgcctcggggagggatgggaccccgggggcggggagggggggcagactgcgctcaccgcgccttggcatcctcccccgggctccagcaaacttttctttgttcgctgcagtgccgccctacaccgtggtctatttcccagttcgaggtaggagcatgtgtctggcagggaagggaggcaggggctggggctgcagcccacagcccctcgcccacccggagagatccgaacccccttatccctccgtcgtgtggcttttaccccgggcctccttcctgttccccgcctctcccgccatgcctgctccccgccccagtgttgtgtgaaatcttcggaggaacctgtttccctgttccctccctgcactcctgacccctccccgggttgctgcgaggcggagtcggcccggtccccacatctcgtacttctccctccccgcaggccgctgcgcggccctgcgcatgctgctggcagatcagggccagagctggaaggaggaggtggtgaccgtggagacgtggcaggagggctcactcaaagcctcctgcgtaagtgaccatgcccgggcagggagggggtgctgggccttagggggctgtgactaggatcgggggacgcccaagctcagtgcccctccctgagccatgcctcccccaacagctatacgggcagctccccaagttccaggacggagacctcaccctgtaccagtccaataccatcctgcgtcacctgggccgcacccttggtgagtcttgaacctccaagtccaggcaggcatgggcaagcctctgcccccggagcccttttgtttaaatcagctgccccgcagccctctggagtggaggaaactgagacccactgaggttacgtagtttgcccaaggtcaagcctgggtgcctgcaatccttgccctgtgccaggctgcctcccaggtgtcaggtgagctctgagcacctgctgtgtggcagtctctcatccttccacgcac

SEQ ID NO: 49 - DNA, 2501 bp, Homo Sapiens
  unsure (1099, 1139, 1661, 1781): unknown base
ccctcacacttcgccagttgcgtccccgtggacagtcatgagtctagaggaaaggggcatctggtctcaggcccgtgctctcgggtggcctccacctgctccctctctcctcactggcctttctttccgtctagcttcctcttcaggaaatgtcctgactcccctcagctcccccttcacccctccttgcccgcctaccctccctccagaatagcccctcacccttcttccccttctagttgatccttttcacctccctgatccccttcatttcttcaccgcggttcctcgtcataggggttctcactctgaactttccctctctactacccatggcaggaacctagtacaggtctcccacccagggccttccaccctcggctcctgtgctgggagaaacttccaggcgtggacagcccagcctgaggcattccagtgctggggcaccgtcgcctaacctggtttctagctttgccctcactccccggaaaaactgacactgacacaggggccctttccttgcccctttagctggtacctcagtggggaggcttccttaccaagaatgagttcctgaaacccagggccagagacaaggacaacttaggggaagacggggttttcggtggagccaggggcaaatcttaatgggaccagtgggggataccccagagcccatggcctgactgcacagcctgcctggaggatgggtgcgcagctctgccctccctgaggcccaggactatgccagaagcgatggggtaccgtgtaggggagccaaggccagtagtttgggggtaggagtcccctagagtctcagaagactgggctctttggagtacagggtccccggcctctcctttaagattctctccccagctggaaggccgatgactgggtggtcgggagggagacccagctctcctttctgtcccgtttgcagcactggttttgtttccttaataaatttttagttatgaaacatacctgacctcttgctgatctgtttctgggactggggagggaggcaggtccaagcctctgcacctgtgtgagggtggccctttctggctcctccacccagcgggcgcagcccatnccaggtccttgtgcaggggcagaagagagcagcggggtcnggggtccttggttactgctttattgctgtttggttcgagtatagaaaatggaagcggctctggaagagcctgtgtacaaggtaggaaatatacaaacgaagaggagggagctaaagagaccgcgttccagcccagcccagcctgggctcgggatggggggccgccggggcgcatgcaataaatatggtccggggccgcagggaagggaagggagggcaccgcgggagtgggagacctggtggtaggctcttcgccttccgactccagaactccccgcccttggtgactgaggaaggaagggttggccctggggctagtgccacttgtgcaaaatgaggaacttcacattatcagtcccggggtgggtgggagcgggggtgcggggggccctccggccggctcagtcccctccccactccccaactctgcccgacgctccgaccccagcggggagattcacagtgagaatgggtgtggtcgcaagggccggaggtagggctaggagtgccccgacagtgacancccctccccctctaagagcagcgcggagccgggggagggggccgacgaaccacaggaagaggcgggaggggcctggggtctcctttggtcaaagctgatatcaaaaatataaatttcccnttaccccatcccacccccgtcccggggttctcccccgacccccgagctaaggcacgaagcagtgaggccaggtgaggccgccgagaggtggagccgccactgtggcgacgctgcggttgtcccgggcacagtgggccctgcgcgccgcccccgccgctccctggggtgcgggccagggccgcgcagcagcgacagagcgggctggcgaggggcgctctaggtgggagagaaacggtcgatggtccggccgtcgggcccggccgccaggtgagcgccctggctcagcacctcggccgccttgtcggggctgaggcccagctcggccgtgaacttggccagcgggtagaggctctccagcgccaccttggggtcgtgcaggaagtgcgtggtctgcgccagcagctcggccgcggccgccttgtcctgctgcttcaggctcagctgctcggccgtgaggcgagccacagcaaagacgccctcggggaagtcgagcttgcccttgccgtcggggccggggacgccggggagcccccccaagcccgccagcgccccggccgcgccggccgcgccccccacggcgtgcatcttcatgtggctgatgaggttgcgttgctgtgcgaacttgccgccgcacacctggcactcgtagggcttctcgcccgagtggatgcgcatgtgctccgtgaggcggtactggcgcgtgaaccgcatgccgcacgc

SEQ ID NO: 50 - DNA, 3025 bp, Homo Sapiens
ctctcacgacctgatttctacagccgctctacccatgggtcccccacaaatcaggggtacagaggagtattgaaagtcagctcagaggtgagcgcgcgcagccagcgtttcccgcggatacagcagtcgggtgttggagaggtttggaaagggcgtgccggagagccaagtgtcagccgcctagggcttgccggtcgctccctccctccctgcccggtaggggacctagcgcgcacgccagtgtggaggggcgggctggctggccagtctcgggcccctcggccaccccggggaccccccccaagccccgcccccgagtgttcctattggcctcggactccccctcccccagctgcccgcctgggctccggggcgtttaggctactacggataaatagcccagggcgcctggccgagaagctaggggtgaggaagccctggggcgctgccgccgctttccttaaccacaaatcaggccggacaggagagggaggggtgggggacagtgggtggggattcagactgccagcactttgctatctacagccggggctcccgagcggcagaaagttccggccactctctgccgcttgggttgggcgaaagccaggaccgtgccgcgccaccgccaggatatggagctactgtcgccaccgctccgcgacgtagacctgacggcccccgacggctctctctgctcctttgccacaacggacgacttctatgacgacccgtgtttcgactccccggacctgcgcttcttcgaagacctggacccgcgcctgatgcacgtgggcgcgctcctgaaacccgaagagcactcgcacttccccgcggcggtgcacccggccccgggcgcacgtgaggacgagcatgtgcgcgcgcccagcgggcaccaccaggcgggccgctgcctactgtgggcctgcaaggcgtgcaagcgcaagaccaccaacgccgaccgccgcaaggccgccaccatgcgcgagcggcgccgcctgagcaaagtaaatgaggcctttgagacactcaagcgctgcacgtcgagcaatccaaaccagcggttgcccaaggtggagatcctgcgcaacgccatccgctatatcgagggcctgcaggctctgctgcgcgaccaggacgccgcgccccctggcgccgcagccgccttctatgcgccgggcccgctgcccccgggccgcggcggcgagcactacagcggcgactccgacgcgtccagcccgcgctccaactgctccgacggcatggtaaggccgggaccccaggaagtgaggaagttagggcggcgctcgggatatcagggacgcgtttccgagggcggggagctggccttgcgggaggtttgggccaggatccttcccgagagagaggacccccttgtcctgggcagctgtcactggggtagcctgttttggaagtgtgcgggcaagcgttcgagctgccccattgggggcgctattagaacactgcagcgcgaacgtgaagatctttttctctacttatccctacttccaaaatgtaaatttgcgccccttggtgactgtccgcccttggtttggccctgcatgttgcagacctcatctcctacccacccgtaattacccccccaaccaggacaggtctgggcccggaactagagccttaggctagagttagggagggggcggctacaggaattggtgttcgggcctcgagccgtcccgcgggcctgactcagtcgcccttgctgtttgcagatggactacagcggccccccgagcggcgcccggcggcggaactgctacgaaggcgcctactacaacgaggcgcccagcggtgggtattccgggcctctccctgctcgctcctcctccttcatggagctgtcctggcctctatctaggacgctcccacccccactcacacacgcctatgtcctgggaagtggtgcaggagatgaaatactaagcaagtagctccctgtcttttcgattgtcccggactctaactaaagtcctcagtttccaatctgtctcaaagtactgggcccgggggtgggaggcttgtcgcggccccacccctgcttactaaccgagccctccccgcgcagaacccaggcccgggaagagtgcggcggtgtcgagcctagactgcctgtccagcatcgtggagcgcatctccaccgagagccctgcggcgcccgccctcctgctggcggacgtgccttctgagtcgcctccgcgcaggcaagaggctgccgcccccagcgagggagagagcagcggcgaccccacccagtcaccggacgccgccccgcagtgccctgcgggtgcgaaccccaacccgatataccaggtgctctgaggggatggtggccgcccacccgcccgagggatggtgcccctagggtccctcgcgcccaaaagattgaacttaaatgcccccctcccaacagcgctttaaaagcgacttctcttgaggtaggagaggcgggagaactgaagtttccgcccccgccccacagggcaaggacacagcgcggttttttccacgcagcacccttctcggagacccattgcgatggccgctccgtgttcctcggtgggccagagctgaaccttgaggggctaggttcagctttctcgcgccctcccccatgggggtgagaccctcgcagacctaaccctgccccgggatgcaccggttatttgggggggcgtgagacccagtgcactccggtcccaaatgtagcaggtgtaaccgtaacccacccccaacccgtttcccggttcaggaccactttttgtaatacttttgtaatctattcctgtaaataagagttgctttgccagagcaggagcccctggggctgtatttatctctgaggcatggtgtgtggtgctacagggaatttgtacgtttataccgcaggcgggcgagccgcgggcgctcgctcaggtgatcaaaataaaggcgctaatttataccgccgtggctccggctttccctggacatgggtgtgggatcc

SEQ ID NO: 51 - DNA, 10224 bp, Homo Sapiens
agcccccacagccccagtaccgccctccccatcctaccccgactgcgtccctgctgtttatctttgcccacccacctcaaccccagtgctcttttcagtccttgggcctcaggtgacacaccagctagtgggacatgggcccccacaggcattctcagcccaacccagccccttccttttccttggccccctggccagcacctgcatcacactggcctccactggacacccttgcagcttcgggccttcctcacagacacactgctggaccagctgcccaacctggcccacttgcagagtttcctggcccatctgaccctaactgaaacccagcctcctaagaaggacctggtgttggaacaggtaggcactggaaagttagctgctcaggaccactgtcccactttaccagcaccttcctgccactctccacttctctctcctagatcccagaaatctgggagcggctggagcgagaaaacagaggcaagtggcaggcaattgccaagcaccagctccagcatgtgttcagcccctcagagcaggacctgcggctgcaggcgcgaaggtaaggcctgtggaaatggcagggagggtggaggggatgcaggaggcatggatgtgggtggggtgcccccaccttccagggccagtcagaccttcctgactttcccccaggtgggctgagacctacaggctggatgtgctagaggcagtggctccagagcggccccgctgtgcttactgcagtgcagaggcttctaagcgctgctcacgatgccagaatgagtggtattgctgcaggtgagggtatcctagaaccttggacctctaagccctactcccacatcccccacatgcattgccatcctcaatacccacctgcctgcagggagtgccaagtcaagcactgggaaaagcatggaaagacttgtgtcctggcagcccagggtgacagagccaaatgagggctgcagttgctgagggccgaccacccatgccaagggaatccacccagaatgcacccctgaacctcaagatcacggtccagcctctgccggagccccagtctccgcagtggagagcagagcgggcggtaaagctgctgaccgatctccctcctcctcaccccaagtgaaggctcgagacttcctgccccacccagtgggtaggccaagtgtgttgcttcagcaaaccggaccaggagggccagggccggatgtggggaccctcttcctctagcacagtaaagctggcctccagaaacacgggtatctccgcgtggtgctttgcggtcgccgtcgttgtggccgtccggggtggggtgtgaggaggggacgaaggagggaaggaagggcaaggcggggggggctctgcgagagcgcgcccagccccgccttcgggccccacagtccctgcacccaggtttccattgcgcggctctcctcagctccttcccgccgcccagtctggatcctgggggaggcgctgaagtcggggcccgccctgtggccccgcccggcccgcgcttgctagcgcccaaagccagcgaagcacgggcccaaccgggccatgtcgggggagcctgagctcattgagctgcgggagctggcacccgctgggcgcgctgggaagggccgcacccggctggagcgtgccaacgcgctgcgcatcgcgcggggcaccgcgtgcaaccccacacggcagctggtccctggccgtggccaccgcttccagcccgcggggcccgccacgcacacgtggtgcgacctctgtggcgacttcatctggggcgtcgtgcgcaaaggcctgcagtgcgcgcgtgagtagtggccccgcgcgcctacgagagcggaaggggcagccaaggggcagcgcagtcgccgcgggtcaagtcgcggcagagggggtcggcggggacagctcccgaggactaggtccgttactttcgccccatcgctgaagagtgcgcgaaaatggtttatcccttgtcgcactccactcgtatctgggccacagatgagcagaggtggctgcttatatgtaaaaatacgctgattttaagtttcttatctttaaaatgccttggcccttcttgagaaagggtttgtgcctactgtcctcggagtccatcttcccaggcttgcctcttctcaaacactcatgaccccctccagaacctttagggtgaagggaaattaccacctatgggagggagcctggaaaaatttagaacctttggtgggccccctgcaagcaggagttttgttgagtctttatttagcaaacacccttttctgacccagtgaatcagatgctaaaatatgcacgcagccacacacccagcagtccttctgcacccctgggaatcgccagcaagcaaaggttgctctcccctgggtagacaccagctggaatcaccaggggtgcttttacagtcctccccgctagcctggatcccaccgcagacctgttgaatcaactgctgggagtggaccctaggcatcagtaaattttaaaaactccccaaattattgtaacatggagtctgggttgagcatcactgctctggcctatttaggaacttgtggatggatagtgtcccaggtctgtgtgtgcatggagaccctctcatccggtacaagaggacatcacaaattcagctggggggagcacaaagttgtgacagaatgcaaagaatgaacaaggggccgagcgcggtggctcatgcctgtaatcccagcacttcggaaggcggaggcgggtggatcacctgaggtcaggagttcaagaccagcctggccaacatggtgaaacctcatgtctactaaaaaataaaaaaaaatgagccaggcgtagtggcgggtgcctgtaatcccagctactcgggaggctgaggtgggagaattgcttgaacacaggaggcggaggttgcagtgagccgagatcgtgccactgccctccagccttggcgacagagtgagactctgtctcaaaaaaaaaaaaaaaaaaaaaaagaacaaggctgggacattgcagcgttctcaaagagaaataaagtagccatggagataagaagcaggatgatttgggcatgtttatcagaggtagagacaagggagaaatcaaagataagtttgggcttttgtctccagtaactgggagcctagtggccatttttgctgcaaagaggaagctgggcaagtgtagcagtgaggctgaagaaaagggaattaaattttggccatgttcacttgaaacgtcttttagacatcctagtgaaggtactggcacggaggatctagtctgagggtttaggtcagtgtttcagccgtggatctggggcagatgaatgtagacagaccaggccagtgatcaggactgagcccagacttcatcgtgagatatggaagttgagtcagaatctgcaaaggagctgagcaggagctgcagggggtaggaggaaaactgggagagtgtagcccctgggagtcaaagggagcaagcttcaaatgatgctgagggggtgagaatggagaatggaacactggattccatttggtagtacacagatcgctgaggaccctgtcccgggcagtttcctggaggaagaggcaagcctggctggagtgggtagaggggagagtgaaggcgaaggattagagtgtatagagaccagtgtcttggtctgaggggagtagagacaggtgacaaccacagggcagacgtaggttaaaggtgtttagtttttccttcaagtaaatgggcagatgtattccatatacgttcccagtgaagggccgggtgcggtggctcaagcctgtagtcccagcactttggaaggccgaggcgggtggatcacctgagatcaggagtttgagaccagcctggctaacatggtgaaaccccgtctctactaaaaatacaaaaattagctgggcatggtggcgggcgcctgtaatcctaggtactcaggaggctgaggcagaagaatcgcttgaacccaggaggcggaggttgcggtgagccgaaatcgcgccattgcactccagcctgggtgacaaaagcaagacgcagttttttgttgttgtttttttaattgccaatgaggaaaggggaagttctgtgctaggcgatagagatccaactgttgagcaggcctctctgcctgtggccttccggccggtttccagacgcccaggtggccaacattagagtccgcgtagcagtgtgaggtaacccactgagataggtcgggcctgcggagcctggcgagcagcggccctctccctggggcttcccttcaatctccgggacatttccccgacctggagctcctccgcctcaccgccaggcctctctgcagattgcaagttcacctgccactaccgctgccgcgcgctcgtctgcctggactgttgcgggccccgggacctgggctgggaacccgcggtggagcgggacacgaacgtggtgagcgcggggccgagggcgtatgggaagggcgaggatgggcaggccacagtgcaggcattctcgagggctgcctgggtgccgcgcgcaaggagcgttctaattgccgatttcccggcggcacagagaggctaattctgcgcgggggctgggaggggagcctggattgccggctccgcaagtactccacccgctgcaagcggacccgggcccaggctgacccaggctccgcgcacgcgcacttcccgcaccttcccgccctcgcctccggccagaggccactcttgtgcgcttgcccggacgctggcacccgcccccgttccctgtggtaggtggggtctgtgagtggagctccggagcgatgaggtcattcctgggggcgaagcgtgcgtgtccccgccccggcgttcctgccccaatgagacaagagctagatcccggcgatctacgtttcagtcttaacggttgcggcgcggctctggcccgggcgcacgcgcacactgacacgcgtacacgcacgcacgcgaccggggcggtggttggcggctacggacgcgcaggactgggggacgggcgggtacggctatgggcgaggcggaggcgccttctttcgaaatgacctggagcagcacgacgagcagtggctactgcagccaagaggactcggactcggagctcgagcagtacttcaccgcgcgaacctcgctagctcgcaggccgcgccgggaccaggtgggagccagggggtgccggcgggcgggaggggaagcggtcgctggagctccgccctccccggtccgttgccgcgtcctgggtcggtgggcagccccaccctcctggctacgtggctccccgcgggtcctggccggggacctgcccgcggaaccgtgcgtaagaccccgattccaccgcctagatgctgggtgccggggcccccttggtttctgtcacagacaggttgaacacggaaaaagcagctgtatggcttgtggtagacctgagccgggcattatccagctatgactaaagccgaccgagcagtttggactagcacctcgatttccgcgttcgaatgctcctgctccctccttggggagactaggggaggatgtggagagggaagagtcctcgccaggaattgagaagtatgtttaggaaaacttgagaggcagagagagatcctgctcctccatctgcactcctgtatggagccagctgagccctcacctcttccctgttctggcctgtcaccagctgctggaatgtggaagattctgttcccttcctctagggtggatctggagaaagatttgggaatagataggaaagaagtcttgttttggaccataagcattcaggagcactttacccacaggaagggggaaagctagattataaaatgcctaaagaggtggaaaaagagatccaggttactaacccaggactgtaaggtgtctcggaacctcctaggtatccccattatcggagaactgtgtgccagatgccattggtgtgaccaccaggctcagagaaccaggcctaggcaccaggaaaaagaaacagggactgtgaagctcagtatgcctggcagaaatggggcggaaatccttatttaagtaaagaaagtggagttgtgagtgatgcttcagataaaattttacaaaattccttacaaaatgggtggtgctcagcacgccaaaatcttagcccagagcttgggtgcaagggttgagttgagtgtagacccctgggcttgtcttcatgtcagtcagtcctgagccattttccactgtggaaaggtgggaaaaccacaagacactaaccaattgaaaaggagggctagccacggaggtgcacacctgtaatcccagctacttgggagggtgaggcagaaggatcacttgaacctgggaggcagaggttgcagtgagccaagatcgtgccactgcactccagcctgagtgacagagtgagactctgtctcaaaaatagaaaaggaagccaagtacggtggctcacacctctaatgccaatgctttgggaggccaaggcaggtggatcatttgcaatcaggaattcgaggtcagcctggccaacatggtgaaaccctatctctactaaacatacaaaaattagccgggcatggtggtgtgtgactgtagtcccagctacttgggagactgaatcacttcaaccgggaggcaaaggttgcagtgagccaagatcgtgccactgcactccaacctgggtgacagggtgaggctctgtctcaaaaaaaagaaagaaggctgggcttggtgactcatgcctgtaatctcagcattttgggaggccaaggcaggcagatcacttgaggccaagagttcgagacctgccaggccaacatagcaaaaccccgtctgtactgaaaatacaaaaaaattatctggccatggtggtgtgtgcctgtaatcccagctactggggaggctgaggcaggagtatcacttgaacccagaagacagaggttgcagtgagtcgagactgggccactgcattccagcctggatgagagagcaagactctgtctcaaaaaaaaaaaaaaaaaaaaagaaagaataggaggctgagaagtcccaagttatatgttaaaaaaaaagaaaaaaacatcagttttaggccaggtgcagtggctcacacctttaatcccagcactttggaaagccgaggtgggtggatcatgaggtcaggagttcaagaccagcctggccaaaatggtgaaaccccgtctcgactaaaaatacaaaaaattagccagttgtggtggcaggcacctgtaatcccagctacttgggaggctgaagcagagaattgcttgaacccaggaggcagagattgcaatgagccaagatcgcaccactgcactccagcctggaaaacagagcgagactctgtctcaaaaaaaaaaccatcagtttttatggacagtggtagagtggagggtgggtccctatggtgcagaagggaaattccatggtcctgctgtgcatccgactgggatggctgttgaaatcctcttccagcaggcagctttggaaacagaaaaagaaactcttcctcctttagaatcctggaagggctgtgcagtgcctctaatccaagtctgttttctgagtgaagatagggaggttcatcaccagaagggaaggggctggaaatgaggtcactgcatcccagcccagggctcctgggtcatccaggaagggaagaaggagcaagctttctcattgttaggtaggagctcagagccatcacaagaacaagttagcaccatccctgtgccctccctgttctgcaaacaaaatgatcttccttcttgccctggcactagagtctgtctggcatttctcctgcccctagtactcctcccatctgggtacttcttcccgttggtgtactgaacaaacacatccactgctttattcacagcctccagccctcattttccagggcccacaccatttgtttttactaacccgacaaggttgcccactgtccccagtaaggtttgtactggggtttttactccagtgctcttctccatccaggagacctttggatacttggggaagaaaatgagcttaaattcccacccctccccctttacctttttcctgtaaggccctggccttagttcttagccccacatccttgctggctgcagaatagcagcgggttctgggtaaggagcattctgctaaaacgctccaccctgctccctcatctgtcctctccatttgtccccatcagatggtttaagtgcttaaggggactccagggcggagtcagggagaaccctggctctcctgggctaggcacaagatcattctacaggaaaccttgtgggaattcttctgggacaaagtattggtcagcgctgagcttagctgtgtctgtgacactcgcattctaactagggcctatctgacgtcaacaggaagtaaggctgatgcagtggggccaagggagtctgggagaagaaagtcggttcagagccctggctgccctgtcccacactccacccttccggcaagaatccagtccctagatgaggtggggagtgagtggtcgagttaaaaatctctgggtcgggtacgatggttcacgcctgtaatcccagcactttgggaggtgaaggcaggcggatcacttgaggtcaggagttcaagaccaacctggccaatgtggtgaaatcccatctctactaaaaatacaaaaattagccgggtgttgttgtggcacgcgcctgtagtcccagctactcgggagtctgaggcaggagaatcgcttgaacccaggaggcagaacttgcagtgagccaagatccagccactgcactacagcctgggcgacagagtgaggcttcgtctcaaaaaaaaaaaaaatctttgggccaaatctccagacagcacaggcaggtgcagaaacccaccaggaagctgcctgtgtacctctggcagattggagcctggcctaaagctgccttttatgcagcttgggtcaaggttaaacatcatgtcacagtgatttttctcactatgtgtgagacatggagaactggctccaagtactactctgtccactggtggctggactactgatgtgcaccactctccactcctctcaccctgcagtgggtcatggccccgtgccggggcagaggagaaaaatgggctgccttctccaggacaaaccctcactccaactcaactagggtgctgtgatcagaatgtgcaattgaggtgtgattttactgattttttttttttttgagaccgagtttcgctcttgttgcccaggctggagtgcgatggcacgatctcagttcactgcaacctccacctcccgagtttgagcaattctcctgcctcagcctcctaagtagctgggattacaggcatgtgccaccacgcctggctaattttgtatttttagtagagacggggtttctccatgttggtcaggctggtctcaaactcctgacctcaggtgatccacccgcctcggcctcccaaagtgctagaattacaggcgtgagccaacgtgcccagcctgtttttgttttttgtgttttgaagcagggtctcactcagttccccaggctggagtgcagtgacacgataatagcttactgtagctgcaatctcccgggctcaaacgatcctcccacctcagcctcctgaacagttgggactacaggcacaccaccacacctggctaatttttttttttctttttttagtagagatgaggtcttgctatgttgcccaagctggtctcaaactcctgaggatcaagtgatcctcctaccttagcctcccaaaatgctgggattgcagatgtgagccaccacacccagcctgattttactttaaatgagagtccctcttcagagtccctcagctgttcctggcccctggccatgtgccttcagttgcccctgcttctgtggtatccttaaggctacattcagtgctgaggccctaggcaggcagcagagagaagccaaatgattctgtctttcccttatccacccagagcatgcaaaaccaggagcagtggtgggttcagggtgggcaccagctatgtatatgtacatcagggacagggggccaaaggcagtcagtttccaaagactgccccagaggccatttttcagagaagccctgggttcctcaagggccctgtgtccatgctggcccatcttgcagg

SEQ ID NO: 52 - DNA, 2501 bp, Homo Sapiens
aatgtgtgcgtccacattaaataactgattgcttgtaaattaaaagtagaacttcccttaaaagtctgcattgtgttactaaaaaataattcataaaattaaagtgattctaaacacattctatcatttaaaacaagattgtaggtaagcagggtggttttcttaaaagccgtttcatgcatttgaccaagcaatttctgatgatcttcctacaacagcctcttatatttggttagtttgcatgagcaagatgacttgtgacagaacattgtgaacactgcctcaaaacacacaaaaatgcctgctccccattctttctcactgatgtggcttaaaagtttgacctaaacaacgtgtgcgtgtaataagttcacgggccggaaaggtaaagtggacgctttttctgccttatcacttgcagcatctattttaagggtaaaatgacaacagccatcactagcaaggatgaataaagcaagaatgagtatcttttctcttttgtctgcacagatcttaactttttttttttttttcgttttagccacatcaggttattataattacgcgacacttatgggaaggaggagggaaagcagggagattagggggggaaatatgccgcatgaaaaaaccaagtggactcatgttagtctttgtattccttttttaagaatttccaaatcatccctgaatagctgtgtctaagacaaaatatgttgacctagctagtggagacacaaaattaatgacctctgtgatgtttctagaggggcagtacctgcatgtactcactggctcagccataagtgacacactgttccccgagtaaacatctgcgcttcttcactgctcagaacaagaaatccttcctctgtagataatgttaaaggtgattctcttgaaagcccgcagaacatcagaacttgaatgacctatggctctacattattcgatttaggaggtacactcttgttttttattgtgtctgtgtctgcttctcagtagcagacctataaacactgctcatacttatcttacatatagatgacaggtagagtgtgcaccagggaaatttggtagtgtcattgagcttctatatacacacatactgctcctctgctactctgagtctggatatggaaactggagtgttgttgtgcttagcctccactctaaaattctgcgtgggaaaattaatgtgcaatttaagaaaaacagaaaaaatgcattttttatttaagaaaaataagcatagatgaatgaaaatacttatacggaatttggaatcttttaaaatatccaatactttggaatgttttaaaatatccaacccaaaatatccaaagttagatgtgtttcagtcatgcattcattgcagtaaatttatatcagtcctttaagatgagagattgttgccttctgaaagacgtgatgttgcaccgttttcttccgtgtttctcagaaaaaagtatgacatttttatcatcctccctcttatttgacaagacctgtttttccccacatcctccctgcctcatatgaggtacaatctctggagtctgtaattgccaggagatgaagcgatgatggggagtgatcacagtcaatagctttgattaacaataaggtagaaaattagcaatgctagcattcagccaccctgccctctccctcctccatatgctctctcagtccgtgctggcggcctcacagagggcagtcggagcccttcgccagctttgaagtgtagcaaaggtgcaggcagggcagagaattagggaaattaaggagaaaaagtagaaactgtaaaaaccatgatgctgagaccttcgcagggcttagtgtgccgcaggaggggcaaggatgaagcgtgctgtgtgttgtccttgtgtgtttttctgtcacatgtggatttacttgtgtctggacatgctgtgatcgaaatggcaactactgttactactgtgaccccatcagcagctctggtgttgtttccgacagaccctgaagatgtagagagggggaacgaccacgggacgccaatccccacctctgataacgatgacaattcgctgggctatacaggtagagtgtctctttcccaaatactaacttcctcctgaaatgcctccacctccatcaaccatcaaccacctgtataaaattaatcgaatcatccctgcttccagctaacaaccacaatttctcatttttcaaacttcattctgttcatatcagatcatattgctaaagtaaacacttttaagaacagaaatgtacatggaaactgtaatcattcttattgttttactatgtttaatacaaaagaatgcttatcaatctgaaactttgatactgctagtatttttagaatgatattttcttagaaatttaatatttgactaagtttttatcataaaggaaaaaaacactacctgcaagtaatttggattcaaatttatctgtacttttttttttttacacttgtagtcttaaaaaca

SEQ ID NO: 53 - DNA, 3501 bp, Homo Sapiens
ggctcactcctgtaatcccagcactttgggaggccgaggcaggcggatcacctgaggtcaggagattgagaccagcctggttaatatggtgaaaccccgtctctactaaaaatataagaaaactagccaggctggtggcatgcacctgtaatcgcagctacttgggaggctcaggcaggagaattgcttgaacccgggaggtggaggttgcagtgagccgagatcgtgccactgaactccagcctgggcgacagagcgagaatctgtcttaaaaaaaaaaaaaaagctaacatttgttgagtctgtcctatgggttactttacagcaactataaaaggaaggtactgtttttcagttcccctgtttataaatgaggacacaaaggtaagcaagattaagagccttggccaaggcaggctgggagtcaaacccaggctgtctgagtccaaaatcgcaaattttctctttttcttgggtggggggaccgagtctcgctctgtcgcccaggctggagtgcagtggcgtgatctcggctcactgcaagctccgcctcctgggctcatgccattctcctacctcagcctcccgagtagctggtactacaggtgcccgccatcactcccggctaattttttgtatttttagtagagacggggtttcattgtgatagccaggatggcctcgatctcctgacctcgtgatacgcccgcctcggcctcccagagtgctgggattacaggcgtgagccaccgcgcccggccaaaaccgccattttcactcttgtgttagcctttagtccaagccccttatgatacaagagggaaactgaggcccagggaggtataacggcttttccaaggtcgcacagccagccagggacacaatccaagcctctcggcgacaggtccagggctgcttggatttcggagtgtggtgggggcatcttggcggcctttttccagccaacccccgcggccggcccggcccaggcccagccgggtgagctgatgactcaacgggcaagcactgcattttgcgatcctggctcgtcccgctgctctagagggttcccagctctcgggccggacgggcggcaacttgtctgagtgaaaccgggaaagctccgcccctcggcgctcagcgggcggcgggggcgcctctcagtcagtcagcgagtcgtggtgtccgccaggcctggcgggcggcgggaaactcgccgcgcgcgttccgccgctcactttcccattggccagtcaggcccccggggcggtaccctggggcagctccctcctgtgattgggcggtattggcctcgggccccgcctccagtccagggctgcgaaggcgggacggagcaaggcggctgcaggttccggcgtgttgctggctgcagagagctcaggcagcgggctcggtaggcacagctcccagcggcccttcccacccagctcgtccttcctccccttcagcccgtttccttttgtctccatctccgaactctgtgggacgtgaccctctcctaagatctaggcttttttggcggcgctataccccttcctcagatcgtactcccctccgctgagatctgagcccttgatgaaactgtgacccgcctgcaaatcgggtgctcagtgccgctcactactgcggcgctgtccttagatctcacgccggagacttcactatttcctgccccgctccaccagagctcgtcagcctcccgcgccgtggctcccactcacctcccctcagcccggcagaggagccacggcgcctcctgtgggttcacccgaccctcccggtcccgtccagtttgactggggccgccgtgatggagagagccggaccccggcctcacctggactcaaagtcttgcgtgcgggccactgagccacctagggagttcagggccctaactcagaggtccaaagtcagggtctctaagtcagattccagtcccactcccagcccatcgccaagaactggaagagagacaggaggagtgtcacaggggaactttattgagaggaaacatggtcacacccagcagacatgctttccctcaatctcggtcttgcactggcgcgcgcgcacacacacacacacacacacacacacacacacacccatctccagcccctgccactgtccagttctcagccacaaggcgggacactcctcaattcctacgatcagaggcagcaggggcaggagggaggcaagaggaggggagaagtagcctggtcctggggtcgggaggaagcgggtgcggagagcaggggtgggggcatgaccagtggttaggtgcgctcaacagctgcaagaagagtgggatccccagccccaggtggcctcagctctgccagtccctctccacggagccctttggagcaagaacagcgcctaggggagaagggtggggcctcccaccccatactagtcctctcggcagggtgggggactggagggggcagggcggggcggtggcgggcaacactcagctctggggctcctggggagcctcgcccccctcttccccggcgttgtcggccgtccacagtgtcaggttgtctcgcagcagctgcatgatgagggtgctgtctttgtaggagtcctcgctgagggtgtgcagatcagccatggcctcgtcgaaagtggtcttggccagagagatggcctcctcggggctgttggcgatctcgtagtggaagacggaaaagttcagggccaggcccaggcggatggggttggtgggcggcatctccttcttgctgatgtccatggcctcctggtaggctgaccgggctgagtcaatgatgcgcttcttgtcgtcaccggtggccacctcggccaggtagcggtagtagtcacccttcatcttcaggtagaagacccggctctcggcgtccccggcctccttgatgaggtggctgtccagcaggcccagcacggtgtcgcacacgccctggagctcagtctccaccttctcccggtactcacgcacctcgggccccttctcctccgagccctcctcgttgcttttctgctcaatactggacagcaccctccaggcagccctctggccgcccaccacgttcttataggctactgagagcaggtttcgctcttcgcaggagagctcctcgcccttctccacggcgcctttcatgaaggctgccatgtcctcatagcgttcggcctgctctgccagcttggccttctggatcagactggctctctccatggctctggggacacacaggcgggcggcgggctaactgctgcctgggaccaatgccggactctgtgtctctcctgctcttggcctgccttttggctgggtggccaggcccagagaagggtggggaggagcagggggcgggaccagggcccaagacctgcctccctctcctctcttccccacaccctttccggctctgcagtaaaggtaaaaaggctgggatgtgggggtgaatcatcagaacagtcagcaggagaaat

SEQ ID NO: 54 - DNA, 2501 bp, Homo Sapiens
agacactgggaagagcctctgaaacccagaggaacgcatgcgtatgggcagtctggggcaggtagaagatgtcaaggtgtccagagataaaggggtcagcatgtgcaagggcacctggtatgagcagatagtggtgggatcgtgggtatgtgaggagaggagaggttgcatggggttaagtgccaggttaggaggagagtttaggtgtcctgttaaaaatgacagtcagctgggcatggtggtatgcacctgtagtcccggctattcaggaggctgaggctggaggattgcttgagcccaggggtttgaggctgcagtgaaccatgatcacaccactgcacaccagccagagcaacagatgagatcccgtctcaaaaaaagtgagagtctgttcccatgatcagtttggatttctcaggctcttggagctagaggcagggaggacaaggtaggaggtgtgttgcagataagatgtaattagagataagcctggtggggcagtgaggttggaaagtggttgtttggtgattcctaaggataggattcagggtctccttggtatctgcccattgctttgcaaatcctccctcttcaaggccagaaaggattgcttgtaaagtgtacttaggaagtagccctagattcctgctttcccaaacagcctctggaaagacctcaagtttcctggagagagatactcatatttccctttgtaggcaaaaattgcatcaagaaggtgggcccggtggctcacacctgtaatcccagcactttgggcggctgaggtggatggatcactggaggtcaggtgtttgagaccagcctgggcaacgtggcaaaatcccgtttctactaaaaatgcgaaaattaaccgggtggggtggcaagcacctgtaattccagttacttgactggctgagccacaagaattgcttgaacctgggaggcagaggttgcggtgagctgagatcatgctactgcactccagcctgggtgacagagtgagcctccgtctcaaaaaaaaaaaaagaaaaaagtggccgggtgcattggctcacgcctgtaattccagcaccccagcactttgggaggtggaggcgggtggaccacttgaggtccgaagttccagaccagcctggctgacatggtgaaactttgtttctactaaaaacacaaaaactagccaggtgtggtggcaggggcctgtaatcccagctattcgggaggctgaggcacaagaatagcttgaacctgggaggtggaggttgcagtgagctgaggtcacgccactgcactccagtctgggtgacacagcgagattccatctcaaaaaaaaagttttaaatgttcctttcaaatgaatgaataagtaataaccctccaaaaaaatcgcatcaagaaaagaggcagctaccacacacaactcatttcctgaaaatctgctttggtggttggcatgttttttgagcaaagtgcaacctatgaccctttcccccacgggatggggtggggcagagggagcctttaagcctgttaagagccagcaccagaaggagccctcgagcaatttggtgacttgtgctcttctgtcctatgtttagataatgctctaatgtgtctccccctgcaaatttctctaattctgcatttttctccagtggaaaatgtggaaggtaggggagctatgaagactagtgtgtttctaaatggcttggacagagctgcccaccagtttgcgccctttggtacatgcctcttttaaccttcggacctgggtcacaggctgttatctataatggtaaggttagaccctttagggagcactggaggagcaccacctggtgaatgaggagggatattccatggcgataccaggaaggatgggggaagcatttggggtgccagagaccctagggacatggagctggaggctgggtggcctctgaagcatagctgagctctgcacatgccagcaggctagaagcaggaaaacacacaagttcaagctggcttttcgtatattgtgtataaaaagatcagattcaggatgatttggtgggattgccaggggctgaccggagtgttgctgggaaggagcctcagctccgctccaggtcctccaccaggtaggactgggactcccttagggcctggaggagcaagtccttgcaggtccagttccaggctggtgtgaaactgaagagcttccgcatcttgcttgggttggtgggctcggcccgcactgcctggtactgctcatccgtcaggaccttcccgtacagagcatccagcagccactcaacgtttgtgaccctcgcgataagcgcagcccggtgctggtctataaagtgcaggcctgggggtgggaggagaacatgagccagcagccagggtgtggggcctgtccctgctgaacttgagttcttcaggaattcctctgcaagcctaggggcagggctccagggggcggccaccaggaccccacatgcagtgggatgagg

SEQ ID NO: 55 - DNA, 11913 bp, Homo Sapiens
taaagcagggtgttactaaagaaagaaggaagaaattggctaaacgaatttagaacacaaataaaattactgcacaaataaaatctctgcttacgattaagctggaatggcggtcaaaaaagaaaagggaaaaaaaattcctagatgcaggtagatttctataattaagccatttctcaaaggggaagtaaatgtgacagaatatttagcaagcaaatttactgaggaatattttgttcctatataattaaattcaacactgaggtaaaactgacaactattaaactgagggcagttgggagagggaaaggggatgagataaaatccagtctataaaacattccattatcttttataggttaaaaaacacaaaagaaatacttggaaagaattgtctaagacggaaagattttaagattgtgtgactttttttttttttttttttttttttttttttttacaggtgcagaataattttttttccctctctcgtggtttttcttttccccatttttttcccctgttgtttgcaaagttgaatctggggtcaggagttctaattgtaacctcagactggaattccagatggtgcgctcaggactggaagcaactctcagttcatcaatttcatgggcctacgtatctgctctggccacggcctggcctccatccccactgtggcattaatgcagaacaaattgagacatatcctctatataattagttccagaatttaaaaagatttacggtataataatagaggcagtgccgcggaatcctttcactgaggactctcggggagctcggggaccatctcgcggtggcatcagaacagacgagtaaccccagcggctccaggcactgcgaactgggggagagggggaaattttgcaccgcattcggcagtacctaacggttccgggctcccagatagggtcagcgaggagagttaggacagtaagtggggactggttaaaaaaaatcgacttaattttgaaatgatcagaagaagctgggagtagttatcacaaagcccctcccttgcccccccctttttttaattgaaggaatgacgttgaaattttcaccgccagcgcggggctgggaaccatcctaaacacttgccctgcagccccgagtgggcagattccgaagagttggagtcggcggggaggggaggaacagctgttgggctgtcttgcgcgtggggctcggggcgcgggccccggggagaggcgctagtcgaaagcttgttcctctcccgcgacaggcagcagcgaggtcgagccactctttattacggcctgcgggccccgcgcgcagtgtggctgtccccgcccttgaccgaccgcagcgctttggggtgtttattcagttgtccgcggccgctgggtgactcccggagggcggcccaggcgtgcgcactggtccctggggttgcggctgtagcagcccagctccgcgctctgtcagatgcagtggacagcgccggggtgaaagtaagggttgagaaatcctcactgccctgctcctacccagcctcgattttttcatattgcaataattatgcaccttcgaggccgggatgcctgcgctttgccagtgtatcaacgccacatggttttccaggggctgtcctcgcctctgcatcccattagctctgaagaggtagaggggtggtgggtaaaacctccaactggacgttgagagacccgggtttcagctcggcgttgccactaacttgtttcctgtccttaaacagtagtagtaacaaaaactgtaaagttgattgagtcaaaggcccacactgctctcctatctaatcctcagaacaactctatgaggtgggcgctagtatcccattatcccgtttgaccagtaaggaaactgaggctcagagagactgcggaactcgtctagggtcacacagctgttggttacctggcagagctgaggttccattctggggccaccaaccccttgctctttaccgctgcgctccatagactgcctctccttcggctgtctgggcctcagtttccttctctgtaaaacgagaagtttaatctgcagctttctttgccaatcggtggttcagaccaggaacctctgctacagatctcggcgctgacaggggtaagaaggtgggtgaaagaagggggcgcccagttttccacagcctgcttttctctgggacctcgcgaagggcgggcctcgcgagctaaaggaggtacaggagagcgcctatcgtccgcggcgggtgaaggtgctacctgccttcgtgctaggctgtgagtcctggtgcttagctcagggcgccaaggccagtgtagctggcatgtcccccttggaaaacctcaggtctcccgcagagaacgttacccacaacaaagaagaggacagagaggcatggagcgccctgcgactgcaggagtacgtcagttccccagcgctggcttagtgtcgcctgggcttccgggcatgtggatccgttggggtcgtacggagacttcctgtcgggtccctggggtcctccgactgcggctcctcagcttagcactttcttcttggccccgcaggctgcagggaactcctcccacctctttagtcggagaagtccaagtcgggcgagggggcaccccggggttcgcaccggtgctcttcccctccccgcccccacaaggattctgagaaaataaatggcagaggagagaggagttctacatttgcttggctctcctttcctcctatccacccctacatccctcaccccggggcaaaaacttatttttgaaaaatgttggcagagatttacgtgtctttgccttacctgggtttcacaaacacaacgactcacattcaagccagcctcccttcagataacctcctctccccccgctaaaagtgccaaggatggtaaaagaagaaacaatctcaatcttttcgtttggaaatgaaagtccccggcttttcataaagggctcctcgcccctcacagttgagtcctagttaagaaaaacgacttccaagtagaaataataggcggggagaaggaagggagatacagggatctggggggttcttagggcaactggcagtgaattttgtctcgagagtcctttctccactcaaaaaaccaaacgcgcgagccccgcgaaaggtttagggatagatcgtgtgggagaggactgagcagagagcgtgggggcagtgtcttgtagaatctttcttttcttaataataattttaaaagcttctgagtggagacgacgcaaagtcaagcagcaaaggtggcctgggaggcaagcggagggctcaagtgccgcatctttaccctcagggtctcctgcgcctacgggatgcgcattcccaagaagtgcgcccttcgagtaagtcctgggcccgcacacacttcgggtccgcagccagaatttaatggcgacaacgtttatgcaatgcaagctaaaaaccaaagcgtaaaaaattactatgtcatttattgaaacgccattctttgtcaaactgcaactactttgcttcacataagtttggctggaaagcttgcagccccagcccgggccagccaggtacaggaggccggactgcaaccggttgcttccctcccgtcgcgcctggccgtcccacgctgcgccgtcgctgctgcctcctggcgcccctgggattttatacgcacctctgaaacacgctccgctccggcccccggttcttctccttgcctaggggttgtttcccaatagatactgactcctttagaagatccaaaaaccaaaccaaaacaccccctacccgccccaaacacctgctctggggcgcgggggctgccaaacagagactagacgaagggagtcagatttagcgaagctcttcgagctcccaaagattcgaacactaactcgcgcccgtgggccgatggaggttctccctactccactccttggtccccttaactggcttccgcctcctggtcaatcactgagcaaccagaatggtatcctcgaccagggccacaggcagtgctcggcggagtggctccaggagttacccgctccctgccgggcttcgtatccaaaccctccccttcacccctcctccccaaactgggcgccaggatgctccggccggaatatacgcaggctttgggcgtttgcccaagggttttcttccctcctaaactagccgctgttttcccggcttaaccgtagaagaattagatattcctcactggaaagggaaactaagtgctgctgactccaattttaggtaggcggcaaccgccttccgcctggcgcaaacctcaccaagtaaacaactactagccgatcgaaatacgcccggcttataactggtgcaactcccggccacccaactgagggacgttcgctttcagtcccgacctctggaacccacaaagggccacctctttccccagtgaccccaagatcatggccactcccctacccgacagttctagaagcaagagccagactcaagggtgcaaagcaagggtatacgcttctttgaagcttgactgagttctttctgcgctttcctgaagttcccgccctcttggagcctacctgcccctccctccaaaccactcttttagattaacaaccccatctctactcccaccgcattcgaccctgcccggactcactgcttacctgaacggactctccagtgagacgaggctcccacactggcgaaggccaagaaggggaggtggggggagggttgtgccacaccggccagctgagagcgcgtgttgggttgaagaggagggtgtctccgagagggacgctccctcggacccgccctcaccccagctgcgagggcgcccccaaggagcagcgcgcgctgcctggccgggcttgggctgctgagtgaatggagcggccgagcctcctggctcctcctcttccccgcgccgccggcccctcttatttgagctttgggaagctgagggcagccaggcagctggggtaaggagttcaaggcagcgcccacacccgggggctctccgcaacccgaccgcctgtccgctcccccacttcccgccctccctcccacctactcattcacccacccacccacccagagccgggacggcagcccaggcgcccgggccccgccgtctcctcgccgcgatcctggacttcctcttgctgcaggacccggcttccacgtgtgtcccggagccggcgtctcagcacacgctccgctccgggcctgggtgcctacagcagccagagcagcagggagtccgggacccgggcggcatctgggccaagttaggcgccgccgaggccagcgctgaacgtctccagggccggaggagccgcggggcgtccgggtctgagccgcagcaaatgggctccgacgtgcgggacctgaacgcgctgctgcccgccgtcccctccctgggtggcggcggcggctgtgccctgcctgtgagcggcgcggcgcagtgggcgccggtgctggactttgcgcccccgggcgcttcggcttacgggtcgttgggcggccccgcgccgccaccggctccgccgccacccccgccgccgccgcctcactccttcatcaaacaggagccgagctggggcggcgcggagccgcacgaggagcagtgcctgagcgccttcactgtccacttttccggccagttcactggcacagccggagcctgtcgctacgggcccttcggtcctcctccgcccagccaggcgtcatccggccaggccaggatgtttcctaacgcgccctacctgcccagctgcctcgagagccagcccgctattcgcaatcagggtaagtaggccggggagcgccccctacgcgcggggcagtggcgccagggactctccgctctaggacacccccctctcctaccccttttgaccgcagctcttacccagctgcttcccaagggccgtgaggatagcggaagcggcggctggggaggaggccggagagtgggagtgcacgcaggcactggcccccgacatcctccaaagccaggcagagctaggagcctgactgttcgcaagagccgggagggcgtctggggccccttagagtccgagagattccgggactgctagtccccacgggagtggaaccaggagaccggcgcagtgtctggctctgccttggggagagttttgttaattaaggaaacgccaaattgtcaccaagcgtagcgcttttcagacgtctggactctggattcggagtgggaccagcgcgggggtgagcgcctgtgctgtgctgcctccgcagcgctaaaatgtccaggagcacctccagcccttataatacggtgttggcacacacttaggtgcacattaagtatcgtagagaactagaatgagcacatgcacctccagtaactaaatggctttctggaacagcgtcgtgtccgtggatagctcccgcgtatggtaatacagaagtggatcttcactgggcttcgctcaggcggcggccacgcaggttctggggatggaagagaacttgacttatccgagtccaagctatgcgggaccaggttctaccgcaggcagtggaaggaggcacgagctttggcctttctttcagcgcatctggggcgcctcttcatcttgtaaacgcggggctcagctgggacagtatttcttcaagacctggggttagaacaaggacagggttattcgctgtgcttagtcaggatacaaggagggaactcggcacacgataagtatcaggttggtttctcatcccgcgccgatgcccgcccacctctctttcgcctgggcggcgcggacccgaacctgcggagcccctgtagtttgccctcttcatttattttcagtggatttccacgctattgagaacctaagccagttcggtttgattcggtaatttagtaaacgctttactaatacaatggcggatgcttttcctggagcaaaattactcgagggcctagggaccgggatgtttttggaatgcgtgggaagcagagtgtatcttttgcaggaggtaccttcgcccaaggctcgggagaagggctctgcccttgttgcccgccttcacccgcgccttctaaacgcgcgtcttcaggccgctcctaccttagcctaaccaggagcacccggcccccgcgaagccttggagaaatcgaaaccgcccttttcttcgggagaatctgggatcactgtcctgtggaggaaccgcaagcagacccaagggttgcctccactctatgcttttagttagtgaaattagtgttttgtactcaaggggcgttgggacaacttactggtcgctgaggcttgtgttctttgatcagatcgcgccacctttgtttagcaggctggtgttacttttggggagtttctaggtctcagtgtccccgtctataagaggacagctgagatgggcaacctggagattgggtccggcttgaagttatactccatagatgcagaagcgctacccaccaccctcttggggctttaaatatggaactcggcaacccatctaaacatctgtgactgagaaacaatgaatccgagagcactgtctgcatgtgtgctatttggaggcggttgagaaaccatcgaatccatgcccctggggcacaaaatactactacgccattatctttttagtacttctaggggatttttgaaacctgggttctgtcgcttcgtttgggtcccttgtccagcccttttcagggcaggtctggtgcctgggatcttatcacatgtcgtggggggtgggactgtgggttttgcagccagcaggcattacacttctggaaaatatctggattcttctgtaatatacaggcgtggctgccatggagaaaaagttaaaaggggaccaggactagtaggtgaatgtatccttcttctccaccctggagaaaaagcccaatggagagagggccctagattcaagtcatatagcctggaagcaccatctccaggtttaagttttgtcttgcagtgaaaacagatgggtccatcttacccagcccttgaggctcattgggcagcttggatgtgagaagcgctccggctgctatcctggagtgggcaagggtggccctcgagattctgggtttattctttggatttccagggttcctgctgcttccccaggaatgcagggcctggcccaagacttgggctgtgagaggcaagggcatcaactctcaaaaatgtggaaatggccatcagagcgccaaggccaaaccccaggggagaggaatcaaggccgtctctggatccctagggcagtctagccatggtgcacaggcaggggcaattgttggtacccactcacaaccgcccaaaacttcacaagcatgttcatattttaaattcttaaatattatatcttgcatcctaatcttgtaaacattaatttagcaaacatcaatcgcctacttggtcaggcactgggttctgaatattaattaagacaatggcctcgagaacctttgcaagaagctcaccagctaatcctggagaggccccttgttttggatgaggaaatccaggttctatgagattaggtggcagaggtgggatttgaacccagaccatgctagggtgtttctactccttttccagggatcttggccccaccgttgagatggatttcttctggcctgcgggaggggcaccaaactcttagtccatgtgtgggggttgacgggtttgtgagggcagatgtggggtgaggacttgagtagccccagactagatgcaaggcttaaggaggaggggaaaaaagcttgcttgggccggacgcggtggctcgaggcggttggatcacctgaggtcaggagtttgagaccagcctggccaacacggtgaaaccctgtctctactgaaaatacaaaaaaaaaaattggccgggcttggtgacgggcgcctataatcccagctactcgggaggctgaggcacaagaatcgtttgaacccgggaggctgaggttgaagtgagctgagatcgcgccactgcactgcagcctgggcgacagagcgaaactccgtctcggaaaaaaaaaaaaaaaaaagaggttgcctgctagtccactgatcccgcagccccgcaggctcgcagaaccctaaggcatgattaggcctgggatcatcaggccaccctagggtcaggtgcggaggcctgcgacgcccgagggccaaaggctccctcttccggtcacacaggagagggtattttgttgggggacaggttttccccaatcacagtgcagctgcagtcatcgttttcagccttctgagcaccttcctggctgagcctgctgtccatttcacccctcagctctcacggcccggccaggccaggcggttcccggcttctctgcagccgccggcgggggaggagggcacagagcgcgtctcgcctcttagcgcacggtcaaggttgcgctcccctcccgggccgggactaaccgtgggaaaggcgctaccttggccactcgattctctccctccaaggcctgtacaaggagcctttgaacacgctgctccttccagccggcagctttacctcccctggcccctgcccccgcactctccgcgccaggccaagcgctgggcccagggacagcgcgctctaatcaaacccgtgtccgataagcttctaattaaaagagacctccctccgctccgcaggcgctttcaccactgcccctcccggggggacctgaaggagagggtttgaggccggtctttgcccgccgaggtctgcgtgtccggtctgggaggaggcctaggagggctcgcgggccacgggcatccttgggcccgagttctggggtgcggacggacgtctcgagagtgggtgccgcgactcgggacccacggccctcgccgggcacggacagttgcggagcagggctctgaggattgtgcagtgccctgggtccctgcctactcctgggctcaggaatggagaagggttcgtctagagaaaacttcttcgtagcttctatttcgtctctctctctctctctctctctctctctctctctccctccctctctctctctctctctgtgtctgtctctctttctctctctctctttttagtgtcctttcagaaattcggccttcactccgggcaatagtgggtgccctgagccaaatttcgtttgtaagctcatctataggcctcaaagaaggccaggcctcaggtttcaaaaggaagtctgtggaagcccaaacgtgctcgcccatgcaggagagctaacggggccgggggttatctttgcccacttagcaggagagaaatggaggccctcgaggtcatatgataaaagctagtggcttctcaaatccccagtgtgtggtgctgagcagtgtgtgagacttaagcctggacctgtactatccgggagttaggatttgccccctccttccctcccttgcactctgccacaccaccctccaggctcatgcctctgttgccccagagaagctttttttttttctttttctttttttttttttctgggcggggggtggtggtgtgtgtgcatgagcgtccgtgtgtgtttcgaaaatggaggtaacgatgccctgggtcctgctcatcggctgagtcctgcttaagtctttggaggcactttggtcaaatagtgcaagagtgggagaatgggtgctgtttgacccaatttactcctgagaattttgtgaagtttggagacccagggcagtcctgggccaggaggatctgaggctgctggggtggccctgccaggatcccataggagcagctctccttagccattgtgtctggacttcaggccacagactccggaacttgtagaggaatgagaccccatccttgggttccggggccaatgacgtatctttagccgaaggatccttttccccagaggcagcaacagctttccagaagcttgtggggtataagtttaaagcaatttaataacaaaaattataaaagactatgttttccaactgaggctccacgctctttttctcactttgggggggggggggaatgctaggatttccctagggggaaactgaggcaaaggaccgaagcactaccatggagggaaagggagatacagtgtcaggcacactctaaaggaaattggttgtccagcctggggagtgaggaagttggctcctacagcagtggtcagggtcggacccctgggcgcaaggtgggtcccataggggggaggaggaggagagcgcagggtcgccatctgaaggcccaactggaaggggcccttgttttccccctcaccagctttcccttgggtgtcatggtgtcaggtcgggtagccccagacagataacattactcggtaattactcttcccatttttaagaccaggccatttaactggctccgagtaattaatgaaagttggtgcgcgggcccctgatttacagctcggagtcaacgcggggttagcccagcagattcatttcgcttgcccgcgctgctcctgcggaagagctgcagtttatttttggggggtgaacaaccttctctgtcgatcaggcaacgagttttatacttaatttgccaggggttcgctgcagaagcggcagagaccgtagaagactgcggcataaataaattgggaaaaagcgaggtgggggttttagtcagaaaaggatggagaagcctgtcccaaggtcacatccagggacttgggccgtcttcctgccgaaagtcctggaggcttgtggggctggattctcctccgctgggggtccgaatgcggggttcagcgcacaccccccccgcccgtggctggttcagacccactgccccgtcttgcgagagcaccgctgacactgtgcttctctccgccgctcccgcagg

SEQ ID NO: 56 - DNA, 4001 bp, Homo Sapiens
aagtgctgggattacatgcatcagccacggcgcctggcctaattttgctttaaaaaataaaataaaaacaggtgaaattagtttttaaatattttatttaacccaatatatcaaaaatgtcatttcaccatgtaatcaatttttttttttaagacagagtttcgctctcgttgcccaggctggagtgcaatggcgtgaactcggctcaccacaacctccacctcccgggttcaagcgattctccctcctcagcctcctgggattacagcctagctgggattacaggcatgtgccaccatgcccggctaattttgtatttttagtagagacagggtttctccattttggtcaggctggtctcgaactcccgacctctggtgatctgcctgtcatggcctcccaaaagtgctgggattataggcgtaagccaccgctcccagccgtaatcagtatttttttttttttttttttgatacggagtctgtcgcccaggctggaatgcagtggcgcaatctcggtcactgcaagctccgcctcccgggttcacgccattctcctgcctcagtctcctgagtagctgggactacaggcgcccgccactatgcctggctaattttttgtatttttagtagagacacggtttcaccgtgttagtcaggatggtctcgatttcctgaccttgtgatccgcccgcctcggcctcccaaagtgctgtgattacaggtgtgagccaccacgcccggcccgtaatcagtatttgtaaatgattaatttttctgtactaagtctttgaaatccagtgtgtattctgtgttcacagcatatctcaatgcagatttaataatatataatagctacatatgactagtgattacagtataggacagcacgggtctagattcattagcctcctctccaagagcacattcaggaaccttctgcctctggccccagaatacacccaattccaagcaggcaattgctccttcttgctttgtcccctttgggtgggaaggggactcctatagcgatagggagtgtcttttattcaggaaaaagaaagggagctgtgggtctaactccgtttttgaagtttgtccaagctgcagaaatcttcctggttactggacaaagcaactaagaattcctatattttaaccgtaacgttgaatcaaactggtcagaatgaaatgaattgtctcaatgttaaagccaaaactcaaaattgaggagccttgcaataccaaattcactgactactttattgtcacttgtaaatcatagtacaggcaggtcgcaaagtttaccaggcagtattcaagtacataacattctagttgtgtttttctccagtttctggggttactgaagaattagccctggcatagcttattacaaactaaccataatcgcaaacttaaaagttctaatatcaagcgtgggcaacatactaaggcctctacaaaaaatttaaaaattagccgggagtggtgctgtgtgcctgtagtcccagctactccggagggtgaggttgggaggatagcttgagccaggaaggtaggggctgtagtgagctatgagcgcaccagtgcactccagcctgggcgagagcaagaccctgtatcaaaaagttctaatatctaaaaggattgtagtttatagtatgttattctcactgtaaaccaaaaggttatttttttcttttgtccactactagatacatctttcttagcctcacttcacttgtacaagccacctgggagaagtggccctcaggaagatcctaaaaccaatacacaaatacaactttttcatttcattaatacatcaagttcatataagagtcaaacaggtaaaagcagcatcccaaactgttttctcctcgtacatgtcagttccacgatcctcagtctcataaagtcagggactagagaccaatgtaattatcaatacgtacctgcctttgagtgaaccttcaatgccaactaggaagggcgcttccaaaacgacgttatttgtaactcctaggaagacaaacacgggtcagaacccatactctgcgggccttgaaatggaaaatctctcctctagacagactcatcctggccgtaaatatcaggagactccccgattccctgccccatccccaggccaaggagttatttgcttccaacttttcatcccgttttcttccccaggtggttctccgccacccggtggagaaagcgggaacaccctctcgggctagcctctgcctttcccgaacgcttcactgcactcactggagaagaccacggccccgagggaccgcgacaggtcccaggcgaggtgcaccgagtcggcgagcactgcgtgacactgtgcgcactggaacacagcgcacctctcaggctgcagccaagacggcagctgcgggccggcggctggctcctcagcccccagccctgcggggccgagcggcgaggaccccttcaccacctgcgtatcccactccatggaggtcgtaaaagaagcttggtcaatcgccctctcagtgccaccacaaaagtccccccggggcggcgttgcacaacgtgagcgatgccgcagcggctgagccgccatcttcccgcagccggcgccttcctttcgaatacacgccaggccccgccccaagcacagctcctgcgtcctcattggacatcatgggcaatccaagcactggagtccgagtccgcgcactcgttacctgaacaggcgttacaggccctttggcgcctgcgtattcgtgaagtgtgaaaaaagcgcgcctctgttgggacgggaaatcagcctttctattggtcagggttagaaaccccgcctttgaggcattttcaaccaatggaagcgcggcattcttcatttaaactgtctataaatttctgcctagtcaaagttaagagtggcgccagggatttgaaccgcgctgacgaagtttggtgatccatcttccgagtatcgccgggatttcgaatcgcgatgatcatcccctctctagaggagctggactccctcaagtacagtgacctgcagaacttagccaagagtctgggtctccgggccaacctgagggtacggcgctggcggtgcgggtccctgggcgggcgcggcgggaatagcggcctcggggagatgcggtgcgaagggaccgagagggaagcccgggactgaggcagctctccctgcccctcgggcagtagatgtggttcacggtagtcccagttagaactctgataaacggaagaggaactgtagttttcacctcattttgaagctggcttgtctgggtgctcacatgataagctctattccgagggatggtttattgttttttgttttgttttgttttgaaattactgtatacctctcagggcgtcgattacgaaactcaggcccagaaagcacaaggggtgtcgttaatcgttagacaattaagtaaataattggctcagcttctggaaaaccccaaacagactccagtgatttgtaatattgccgataatctcttgatactttattgatggacctgtcagaaaaaaaaaatcgacttttaggggagcacctccttgggtaaatttttattgatgactgttgggttgatggtctctatcaaaaccagtaaggtctttgactccgaggctacaagatgtttggagagttggcccggcgctgtggctcacgcctgtaatcccagcactttgggaggtcgaggcaggcggatcacctgaggtcaggagttcgagaccagcctggcccttaaaaaattagccgggcgtggtggcacacgcctgtgatccaagctttttgcctgtgatcccagctacttgggaggctgaggcagaagaatcgcttgaacctgggaagccgaggtggcagtgagccaagatcgcaccactgcactccaacttcggtgacagagagagactcagtctcaaacaaaacaaaaacaaacaaaaaacccaagatgttagaagaagatt

SEQ ID NO: 57 - DNA, 1301 bp, Homo Sapiens
cattgtcatcctggcccgttctcaatgagctgttgggcacacctcccagacggggtggtggccgggcagaggggctcctcacttcccagtaggggcggccgggcagaggcgcccctcacctcccggacggggcagctggccgggcgggggggctgaccccccccccacctccctcccggacggggcggctggccgggcagaggggctcctcacttcccagtaggggcggccgggcagaggcgcccctcacctcccggacggggcggctggccgggcggggggctgacccccccacctccctcccagacggcacggctggccaggcggggggctgacccccccacctccctcccagacggcacggctggccaggcggggggctgatccccccacctccctcccggatggggcggctggccgggcggggggctgacccccccacctccctcccggtcggcacggctggccgggcggggggctgacccccccacctccctcccggacggcacggctggccaggcggggggctgacccccccacctccctcccggatggggcggctggcctggcgggggctgacccccccccacctccctcccggacggggtggctgccgggcggagacgctcctcacttcccagatggggtggctgctgggcggagaggctcctcacttctcagacggggtggttgccaggcagagggtctcctcacttctcagacggggcggccgggcagagacgctcctcacctcccagacggggtctcggccgggcagaggcgctcctcacatcccagatggggcggcggggcagaggcgctccccacatctcagacgatgggcggctgggcagagacgctcctcacttcctagatgtgatggcggctgggaagaggcgctcctcacttcctagatgggatggcggccgggcggagacgctcctcactttccagactgggcagccaggcagaggggctcctcacatcccagacgatgggcagccaggcagagacactcctcacttcccagacggggtggcggccaggcagaggctgcaatctcggcactttgggaggccaaggcaggcggctgctccttgccctcgggccccgcggggcccgtccgctcctccagccgctgcttcccgggcggcgctcgccggcgcggtggcaaagaaaaaaattatttttgtattaacaaaattaaaagtaaaagtagacctgtatatacaaagggtaaagtaaaattgaccctttgtatatacagtaaaattgaccctttgtatatacaggtctatgaa

SEQ ID NO: 58 - DNA, 3001 bp, Homo Sapiens
aacaacaaaagatttagaatattccataaactttgttgataaggcagtggcaagatttcagagaactaactttgaaggaagtcctgctgtggatgaaatggtatcacacagcatcacatgctacagagaaatctttcatgaaaggaagtgtccatcgatgcagcattgttgttttattttaggaaattgccacagccatcccaacgtttagcaaccaccaccctgatcaatcagcagcatggaggcaagaccctccaccagcaaaaagattatgatttgctgaagattcagatgaccatgttaaattaagtttagcataaagctgcctccttatgcattttaagttcagactaacaatttatttctttctctctctccctttctctcccttcctttcctttcccttcccttcccttcccctcccttcccctcccttccccttcccttccccttctcttcctttctttcttttctctctctctttctctctttctctttttttgagacggagtcttgctctgttgcccagcctggagtgcagtggcacgatctctactcactgcaacctctgcctcccagcagagagaatcaagagattctcctgcctctacctcctgagtagctgggattataggctcgcgccaccaagcccggctaattttttgtatttttagtagagacagggtttcatcatgttggtcaggctggtctcgaactcctgaccccaaatgatctgcccccgcccccccaccaaagtgctgggattatagatgtgagcctttgcacctggcctaacagtttctccatacatagtgaattgtagacaactacaattgtaaatgtgtaaagagactgtaaccttgtaacaagtagcgagtctcagtcaatcacagcagcggagttttggccaatcacaggtggccaactgtttaaacagtgctcaaaatagtcagaggttgagttgcaaccaatccagctgtttccatacttgactgcaatttctgtaagtcattttcctttttctgtccataaatgttatttgaacatatggcagcccgaatcactctgaacctattttggttccagggattactggattttggactcattctttggtcaattcaactctgtaaagtttaatttgtctaaagattttctgggccggatacagtggctcacgcctgtaatcccagcactttgggaggctgaggcgggaggatcgcttgagcccaggagttcgagaccagcctggccaacatagcgagatcccgtctctacccacaaataatttagccaggcgtggtggcgcgtgcctgtagtctcagctactggggttcttattcctcgtggcaacacattttggagagggggaggtattcctgtctttgctgggtgggagaacggccagtgggcaagggaggacgaaaatgagaactgtgactgccagagggcacgtcaattttaggaagagaacgtaagaaagttgggttctgtggagacttggcatatccacgccacctggaaaatcatcacgtgccctccggggcaagaccaaggcctcaagtcacccctcgcagcccagtggacctcccggccatccctttcacggctccacagcgaccgcgagccgttgccccggtgagaaccccccggcactgtgcgcgcccccgcctgccgtgcgcgtccgcttccctgggatccggcgccgcgcgcgcccccgccgcgtccccgccccttccggcccgggagatttgattcccttggcgggcggaagcggccacaacccggcgatcgaaaagattcttaggaacgccgtaccagccgcgtctctcaggacagcaggcccctgtccttctgtcgggcgccgctcagccgtgccctccgcccctcaggtcagttctcccgcctgcccgccgcagtcgcagttgatggctggggtctgggctgtgcggggcgcagcggcccaaacccagtttgctcctggctctcgggagactggaggatttcatcggagccccgcgctttaccagccctgttccctggataagatatttgacctttccgacccgcggttttcttctccgtaagtggggataatgaccgtgtctacttaacagggttattgaagaggtgttcaggctaagcgtttgccacctaggaggctgcgatagacgtgaattcccatttcccgtttccagtttccgtgactcttccccgcgaaaaaagttgacagaagggtttcgagttttttctgtttgtacaactcagtttactggggcagtgcaataaaaaaggagatgtgttatcactaccttttcagagtccaaatccatcctctcctatcatctccccagagtagtggcttcagaggctcacactaaaaggggaattttttttctttttcttcaagacggagtttcgctcttgttgcccaggctggagtgcaatggcgcgatctcggctcaccgcaacctccgcctcccaagttcaagcgattcttctgcctcagcctcccgagtagctgagcttacagacatccgccaccacgcccggctcattttttgtatttttagtagagacggggtttcaccacgttggccaggctggtctccagctcgtgtcctcaggtgatccgcccgccttggcctcccagagtgctgggattacaggcgtgagccaccacgcccggcctaaaaggggaattttcaccgaatgctgtatcagtaataggagcagcaggattgctcccaccaagaaacctggtgtagggttgtgggagctggaaagggtagactcagggaaggctgcccaagagaggaatcaggtccctagcacttaggacgggtaattacctttggtatttctcctttgttagtggaatgaggtgagtatcaggagcctggattgttgtttagaggccagtgttcctaactttggtttaaattttggtttctgtttcccatggagtctggctagaaaatcagaaaaatcagaaaagccc

SEQ ID NO: 59 - DNA, 2501 bp, Homo Sapiens
cctgtaaattctctcgaggtaagtaagcactcttccaacaagcaccacttgggggtgtgcccatggtggggggacactggcccacacaggcatgcacacccgtgcatataaagtacatagagaaatggtggagatattcccgtgggctatgtttgcctgtagtttaacacaactatgcattattttattgatggcaagacaatcacaagttatttgacaatattaagtatttcttatttcaacacgttgcagtacttttgaatttccaaaacttatcacaatgcaagttccaacttgagagcaggagaaacaagaatatacattgagcacatgtatctccgtgaggatgtgtttgtggaaggtgtatacacaagtctatctctatatataattatgtacacacatataaaaactaaacacatgacatctgaaacacgttcaaacattggtccttgccttctgcaagaggtgctcagtgggatcctgcttcctctcttcttcacctgaagataaattccttgctagagatgagctctggcatacagcctcctaggcagagggtgtgtggcaggcccactgcacaaatatcagtcctgccagattctgctgcacttactgcctgccatttcagattaatttctgagaagtttcaaaattcattccaacgaccttgtggagttcagcccaccataccccagatggtcattcatcccatctatgacatgcccagcagcagcctggagggagagccaatgacagcagggagggtggggtttacattttggccagactcactgcccattgcacctggctctgtgcaggctcagggcagtgagtctgagtctatttggaatgctggccaagtaggttatatcacttagtgggaagagagagttctcttcagagactttgcagattctcaggactaagccattctcaggaatgaatcaaaaatggaagagatggctctctgggggcaagcagccttctggagaccccacctgaaccacatcctcaggtgaccacagcgcagccacagtagccacaaagatatgtccacaaagacttcaactgcgccatgccactggggtgaaaacatagcaacaaatcagcttttccagaaagcactcaacaatattagcagctgaggctctaagaacatggatctttcaaggtggtggttctgcagacaacacccccccccccccccgcctccccatcacagaggatcaactccaggtggtccagcttccctgacatccaggaggaaggcttcaggatggcacactgcccaacatcacacactgagtttcttagacttggcccaggcatgtgtactgactgctgggtgggctggttaaaatattttcagaagtacacatggcaccccagtctataaaccacgcaccacgcagctgcaattgccaacagcacctcgtccttctgatggcctcttgctctgccagtccctgagggcacagagaacacaaggttgcctgtaccctcaacccccttcaaggcttttcagggaaagagaaggagaggtgggagcagttcctctgggggctgctgccgggctgcctagagcccacagaccttggtctcagctccacacgaggttgacgacccactctggccatggaaagacaagagtcagagctaccttttcagaggctgatgtgttcaaccaatgtttgatttaactggagtagggcctagagagtggggccagatggccccagactgaagcctaattaatttgctcagttaattgttttaatttattgggctggggataggaggaaggcagaggtgatgaatggttcaaagagaacaggaaggaggaggtgtgtggaaaaggttctctataagtttacaaatatacaaaaacaaaaagcacatctttcaaataaaaatgactacatttttatctggcaaaaaattgtatacacatgatttaaattttttttaaattttaacagtttttggcaatcttaataaagtacaatatattacaaccaaaccaaaaaatagttgtttaagtaacagccgttaagagtgatgtgatccctgatgcccagcctccctccccatcccaccctactcctaaagacagagagaaaagaaaaatcctcccatcttgataactcggttccctccccccttaggaagctagccaataggaagcaacacaacaagcaaggagtgtcatgggaagccacaggtcggctctgcattagcaggagcagccgccctcgctggccgggggctcctggggtttgtccagcttgatgtcgatcactgcagggggacgggctaaggaagatgactctcctggacaagctgccaccccacttagccctgtgcactgtaccctttggctactgctctgtttctctgcaaacacctagggacttggctcttggtttggctgggctaggaaggatgcaataccaactccaccttgcctcctcttcccttcacccgtccacttcccccag

SEQ ID NO: 60 - DNA, 4001 bp, Homo Sapiens
aactttgcaggcccaaaccatcctcccacctcagcctcctgagtagctgggaccacaggtgtgtgccaccacaaccagctaatttttgtattttttctattagtttcgccatgtttccctggttggtctcgaattcctgagctcaagcattccagagtacctcccaaagtgctgggattataggcaagagccactgcgtccagccagttccaaagtttagaatttcttttctaaaaatcttttctaaaagttttaaattctgaaacatctggctgccagggttttagataagagattgtggaccaaaaatcaagatgttttgaaaagtgcttttctctgttctctccttgtgttacccccaggtcatgtaggaaaatgggaaattatgctggacttaatgccaaaaaagctagattctttgcttcccccatttactttgttgttgttagttgagacaggatctcactggagtacagtggcatgatcttggctcactgcagccttgactccctggcttcggtaattctcccacctcagcctcccaaatagttgggactacaggcgcctggctaatttttctattttttgtagagacaagagttttgccatgttgcccaggctagtctcaaactcctgggctcaagcgattcacctgcctcggcctcccacatttgtatttttcaaagtatactcttaagctcagatgaattcaagtttttgcagccagaaactggtagaactggtgtttgaaatctttcattttccagtgcttaaactcttcatcattgtaagatacttcttgtgtgggtcttttttgtggaaaccacacttggagatttctactccttaaccccaagcctctttatgacatccatccaggaccagctctgctttcctgttgaaggtctcaagagacttgccttcctcctctcggtagctgccagtactcttaccatttcatgagttttcccccaagcttggctgtgaaatgtgatacctattagcttccgcagcacctttctcccaacttccttgctatacctgatgacaactcttcaggcctcttatattcctaggatcttgctattaatcactatagggataagtaaaagtaatatatacaaaataattgcataacagaataatatagggcagttacatagaatgattcttgctgtttaatcctggaaaatgtgatccccgaggattcacattttaatttctgctctttatttctgaggatggagtcaccgttttccccttctggctacacatttagatgcatttcaggtctgatgatagttgcaatgtaaaaaagaatagcaaggcctttggtttctgtagacaatttggaccagataacttccagactgggtaatatccggtttattagtgttactggatgggaagtcttgactgagttgtctgggtttttggcgtgttgaacaaagaattgaacaaaacgtagaaacaaagcaacaaaagaagcaacgaaagacaaaacaacaaaagaacgaagtaacaaaagcacaaatttattgaagcgaaccaagtgcttcaagagtcccaattgcagtgttcttaagggttactaggctaaaagaatttggtaaatccctaggtgccctttacagtcgtccaattggttgcaccctatgaaggattggcctgcgaccaatcagaggctgaaatggagatggccgaggacaatcagaggcgatgtggaaacttctgtcttgtaatcacaggagtgaaggtgtggcctgtatgctgcctagtcttgcctagaaattgctgcacctgctgttcttttgcttatgccttaacccttggttaccctaattccctattctcttgcctcattaggtctttaccctgactaaaaatgcactcatctagctgggacaaatcctacactgcatttgtcccatctagatgagtattctagcagagtacatggcacatgagtaggcattcaaaaattcaacatacagtacattttgttacctatgtgccaggtgtcgggcaggctgagttaacagctgaacagaaacctacctacccaacgtgctaacttctatacagcatggtcgtgcatccaaatcaaatggaaagcggtatgggagatctggaaaggcctcctgtgggtggcatctgactacctaaattcccatcccagtttcacttactgactttgacacttggaacaagcagcctctcagtgcctgttttcccactggcaggtaaatgggctaatgacggtatttctggcactagacttcgttaattaatgaaaagcacatagaagaaaacagcctggctctctaagtgggcagtgcgattcccaaggacggcacttcgcctgatagtcttcctctaggctgagaagccagagtaaatccatttgattttcctaccacacagtgccttctccccagatgagttcaaagctttaagtctatccagttctgtccagacgcgtctgttcatctccaacaggcccactagagaggcgggttttccaaagcctggcacggcccactgcaggtgacgccctctgccctccagcgccctcaggcctctggggtccacccttcctccccacccgactccggaacctcttcccgcgccctgcccgggcgcctggctgcttggggtagaggccttccgccacacgcgcggccccgccccggccttcacgtgacctggcgtgcggagcgcgcacgcgggaacccgcgctggaggcgggcgagggccgaggggcagctagggagcgcggcttgaggagggcggggccgccccgcaggcccgccagtgtcctcagctgcctccgcgcgccaaagtcaaaccccgacacccgccggcgggccggtgagctcactagctgacccggcaggtcaggatctggcttagcggcgccgcgagctccagtgcgcgcacccgtggccgcctcccagccctctttgccggacgagctctgggccgccacaagactaaggaatggccaccccgcccaagagaagctgcccgtctttctcagccagctctgaggggacccgcatcaagaaaatctccatcgaagggaacatcggtaaggagcctccggaaatgtgggacgcaaggctggggtgtcgcggcagtggctgaagcttcccttcgccgcatctctctgcagcaactcggtgagggctttccctccagcctggcggtgtggacgcggcctcggcttcctttcccacccagagcatccttcccttacctcccgctccacggggtgactgcggtccccggggtcagactgggcgccaggcctgcggtctctgtgaggcgcgctttgaacctctgctccctctttgttgggaactcgcaaagggaagcgggggaagggtattagatttcttgaggtgtaacttacattaaattcaccctttttaggtgtactcttctatgaggtttgacaaacattatgccttttgctatcaccatgatcgagatacagaacattttcatcaccttagaaagttcctacctgctcctttgtattcagccccctccacccttcctattccctggcacccactgatttgatttctatccctgcaagtgttgccttttccagaatgccatataaatggaatcataggctatatcgccttttgtgtctggcgtctttcatttagcataatgcttttgaaattcattcatgttacttgtgtctgtagtttgtttctttttattgctgagtagtattccattgcatggatgtaccatcgtttatccattttctagttgtggacctcagggttgtttacagttttttagctatattattagcgaagcattgttttagctatattattaacgaaactcgaaacattcgagtacaagcaaagaggtctttaatgatcttaatagcatggagttcctcaccccttactccacatccaagtaaacattggattatgattcaaagaccactaacgtttctgttaactcagatg

SEQ ID NO: 61 - DNA, 2501 bp, Homo Sapiens
ttataggaaaaaaatttaccaccgatgattccatttgtgtgctgggaataagcaaaagaaacgttatttttcaacctgtggcagagctgaagaagcaaacggattttgagtaagttggctgggttccctgaggcaataagaccccaatgtgagtacgggacaggggaatggccattgctgttgctgtcggcaactcattcaggggtttgaggaactggcttttctgaagctcagttaaaaaaatactaggtcttggctgggcgcggtggctcatgcctataatcccagcactgtgggaggccgagacaggtggatcacaaggtcaagagatcgagaccaacctggctcatatggtgaaaccccatctctactaaaaatacaaaaatgagccaggcatggtgatgcacacctgtagtcccagctactcaggaggctgaggcaggagaaatcgcttgaacccgggaggcagaggttgcagtgagctgagattgcaccactgtactcaagcctggcgacagagcgagactccaccactgggtcttcgggaataattttaaacaatggtttcatttgatcctgaaattggctttatcatctagttgattcagccgaccctacaaaccctgtgtttctggcaagaccgctcgctgtgctggccaggcggaggcatctcccgccagtgactgcaggcctcactgctgtctcctcttacctccacaggcacaggattcccaaagaacagtggtggctcaagctacggcccctcatgaaaatcctggccaagtacaaggccagctatgacgtgtcggactcaggccagctggaacatgtgcagccctggagtgtctgacccagtcccgcctgcatgtgcctgcagccaccgtggactgtctgtttttgtaacacttaagttattttatcagcactttatgcacgtattattgacattaatacctaatcggcgagtgcccatctgccccacctgctccagtgcgtgctgtctgtggagtgtgtctcatgctttcagatgtgcatatgagcagaattaattaaacatttgcctatgactccaacagtcctctgttttagttttttaagtaggagattagtacctcaatctatgggtggctactaaaggttttctcagttttgtgggcaaagattagcaaaatatttttatagggatcactgaactatgcacacgtcatacaaggagaacaaagccaggagttcacacaggccaaggggaaggccacgtttactcaccattccatatctgccatgtgtcagtttccatccacagcagcaggccgggaccctgggcctcgaccccaggctcctgctctcctttgaaagtaaaacatgaatcttagttacttgtcctcttgattgcaatcctagctgcatgttaaaaccaccaaggggtgggtggggcggaggtgggttcaaaaatctgatagccagcttctcctccaggccaagccacagtcctcgctgggacctaggttggaactctccggaagactcctgccagagtagacacggctgctgggatgacagccctgctgccctggtgggcccccctcctgtagggacagcgtttctgcctcttagctctagtctgcaagagagaacagctgcgcctcagaaatgggggcagagagctgggtggagggagaggagaggccaaaaacaaactctgtttgggaaatcagagtccgacagccaagaaagagctagcgcggaggctttcctttctggctctgtaacgatgaagcaagcgcttactcaccccaacccacttgcttctcaggacggtttccatgcagccgccgcggtgaactcccgtctggtggacactcccccagggcctcggtgtgatggagtttcctgaatcagcgcaggcagacgtgggacacccttgtgcaccttttcattttacttctgtttttaaataaaggccctaaatgctgcttaaaataatgactcaagcagaggttaagtcagagttgccctttatttttagattcttaaatattctagaatgaggtaaaacgagcctgccagtacaaagtgaaaattctacatggtgcatctttggcgcttcatgcatgattatttcaatgaacctcttcctggtcactcttaagatagatctgagtttttgactcgccagtcaagggctttggcgacactcaatgacataatattcttggaaaaagcagtagcatttctgacttttcatattcagctcggaggtgtattgtctcgggctcctgtgcagtcgagcgccacggctgctcattggatgatccaggatgggtccttggcaattttcgggttctcgggtccgaggatggccaggccgtgtgtgctcttcccagtgccgaggtatctgagaggaaggcaggcgtggtcagcaaggactggcttctgcgtgagcgctgttagagtcagcacgagggcttccagtcccagacgctgtctcccccgctccccac

SEQ ID NO: 62 - DNA, 4001 bp, Homo Sapiens
ccatggatagtccggagtccaaggtctctgggtgagcagacagtcggccaaaggccagcctggagtcaaagagaccagacccctgcttagattgccatactcgcaccattccaaacctgcctccctcacaccctgccatgggggaagaggtgccgtcttcctccagtgcctcccttcccaggatctccccaccctgggctcagccagaactcccatttgggaggcttagttccatgtgtccatgaaggcccagcttctctggggagtgaccagctgcccaggagaaactcctgcatgcagaagagactcacaggtttgggttcgcaggcacgaactttggaaaccggaagagtctggcgcacttacaccaggctctaatcccccacctgatggctggcagcaaagagccaacgcaaggggcagaagcctgctcaaagtccagacacagtccgtgaagagagagcccctctcaagaattaggtccaggctgggaggaatgtggggggagcttgtagttcctggctcagtcttttctcaggggagtggcaccccagtatccacttggcagatcctagttggataactgctcaagatgcaaagggagaatgggtggaaagaacagtgacgtggaagaggtttgggatactggcctaagacatacagaaacgtgagttgggtttaggggacagctgtgcagagagatggggcatgctgactcggcaggtcaaggccttgtggctgctggccctatcgggcccctttgtctcatgaagattgagcacttctcctgtccccagccaactgtcctgtccaggggcataggagatagcccccaagttctatagctatagggttcccatcagttgaaacagatttgctttttcgctattcctcttcgtagccccaaattcgttgttggaggcggtctccgctgtgtcatgccatgagcaaagagtgaagagagctgtgtccacagcacgaaggggtctccttggccagtgtccaagccccctttcctggatatcttcagccttaaagaacagtcacaaggccacccattggttgaggaagtcattggagaatgggagtttcggaatctggctgccgagtgacagcatccctgaatcatgcgttccctgcttgtcccagctttccttccatcctccaccccagggaggatgcagggactggccagaatggaggaagagctggaaagactcgtgggcctcagtccctcattgcaggctgaaggtgggcagcggagcacatagtcttgtcccttccaaagcatggccagtttagactgattcttcctatctggcttctaaagtctagcaccctcctaaagttactcaccttccctggctctgcggcctggattaagctcatttctattttgcaacccattcccccattttcctctctttcctctcaaatcctagaaaatacatatggtggggaagctaaggaaatttctattggcttttccccctttctgctgctttgtgccaaagctagaatggaacagtcagccccctctcccttcagccctctgttcctccccacatcgactctggccggaaccatccatcttactgttctcctgcatctaaacctttttgccaccatctccctctgccatctcttacttcagtctccctcctgctctgccagcatggagagtgagggaggcttccaaaaatgcacattctgttcagatgaaaggaaaaggctggggtgggactggtggatccatcgtggacctgttgggctcatgtggtgtggtgtccggagactgtgacttcctgagggtttaaagactaaaatgggatggactgaggcgcgtgctgtgtgcaccacggagggctggcctctgcctggctcggtgggtgcagatgaacacacgtggggaatcactgtcaaatccagtactgtgccccacaaaaaagctgagtttattgctcacgggaaactctgcctcgaggcaggcaaaaatgctattacgggttgtattaggagaatatgggttttctcagttttcccagaatgaggaagctcctcaatgcccctataggaactactttgaaaagttaatgcaaacctttgaaagaaaggaagaaagaaaaaaacaaagaaaaagaatagatttatatgcctatatatgactatatggagtcctgtagataaatacgagcccacttttttttttcagcctatcctcccccacagaggctgctgcgctacttacaaattgaattaaatgagggctgaaacggcacgcttcagcatgtactgtagtcaccgtggaagaacaagtctttccaatattggggcatgtattgatttctaaaaaatgtctgcctggggaatgaaatatgcacatgtatttcatattcacagatctgcttccgaaaacctctctatttaatatcactcaattatgaatttgttttgctttcagaggaatggaatgcattttagtttttataaatttggggagagacaacactctgcccaggtaagaggagaggaagttcaggggtccagctgtccatactgctggctagaggaggagacagatccgggagaggtcctggagtgttttgccttttcctttctccccctgaccaatccatcctgggaaaccccaatagtgtcattgattgccacatcctgggctgcatcttctagcgcccacctctcccgaccccaggccagggctggacgtgaaagttgggcccctgcctggtctcggtgcatgtccttcctgcccacctgcttgtcttccttttcctaactctattcgtctttctctctcttctacacaaacacttccttcccttctcttcctctcgttcttcctctcttcccttctctgttcatccaacttgcctcaaaaagaaaaccatttaaagggggggggtgtctttttagctttttgcatctctgttgttgccattttcgaagttgagcccttgctagagattccgaggtcctcagtttcctcaaatagatagatatatatttttcccttaaatgagatgaaatgagtggcgtcctggggtggagggaggcgctggctggagtcggggctgggggtgggagggggtgagggaaaggttggggggggacgcatcactcaacgttgctgctgtcgaaggtgtggcactgaaagtccccgtcaacgtactccatgcctggcagcttcatcccgtacttgtccacgcaccagcagatgccacgtttgcggccacgggaaggtttgcactggggtgagtagagcaacaggcggtgaggacggccgcaccccagggctctgctcctccctgccctgcctcttgtctaccccaaggcaagactctcatccccagagagttgagggcactagacccgacccttgggtttctggtgtccccatttcacggaaagacccagggaaaatgtgaatttaggcagcctacccttggcaagctccttcaatccctttctttccttttttttttttcagacatggggtcccgttatgttgcccaggttggtctaaaactcctgagcccaagtgatcttcctgcctcagcctctggagtagctgggattacaggcgtgagccactgtgcctggcttatagtcccgttttaaatattacccatttgagttcccccaacgtgaaactctgcagggattctcaagagagttatgatccaataataatgatgatggtaataataataacagaaggaggcatgatttgtggtgttatcatgtagtagacaccactcaacgtttggtaggcagtaggtactgttctaagtgctttacaaagaccaatcactcactcctcattcaccattttacacaagggtctggaggcacagagacattaaatggtgagtaacaggacacagctagtaagtggcagagccaagatttgccccagtgtggcctggctcttacatttagattattggtgcccttaaagcagcatcagggtcacgtgtcca

SEQ ID NO: 63 - DNA, 4001 bp, Homo Sapiens
agttccagtgacctgcccaaagttagagaactaacaagtatcaagtagaagactaagagaagagctcacatcagtaacacctagtcaagttattttccctttgttttatatattagggtttcagtgggtattttccaaaagttgatatttgctactttagctttttatctataaagtgggatgataacataacacactcaaatagttgcatgttttttctttttttcaattaaatagggtagagatagtgcatttgaaaaaaaattgcactagaaagtgctccccgttcaaatggtggttattattttatactttggctgcatctcggaatcatagcaggcagctttgtgtgtttgctgattcctattcatgggaaatgtgtttgtttatatcacagtgtattatctatttttccttttaatacccatgtggccaaattacgaactgccatattaataagatgcaaacatatttgagagggtggttagacttaatcgttttcataaagttgttttaatagttgtttttcaacagatggacagcttacatttggccacgtttctgtgacagtgtgatgattgaacttttcaacagatggcatacaaacacttgggaaaacacccttctaacattaattgttataaaaaagacttttagagtgccagaaaaatgatagtctgtattcccaagtccttagtctctgctattataatttagatgatttggaagtttctatttctggcatgtggatttgtttcataaatgagcatatatatctgcattagagtgaaatgatgaggaacaccctgttgtcaattagagattcaacatagatacagcatttaaatcctcctttgtttgttgatagatgtacataatctcctcttgctgagtcattctacttctattccatacatagaaaatataacctttcataagaatcaactgtcagatacttatgtattctttctaaaaagtattgacttaaaaaaaattaccaaacttagaatttcaaacatgttcatcaatgtgatgaactcaccagctttccaagttgtcctgcgtctgctgttgaccacctagcatggcttctggaatcggtaagtgaggaatctgacaataaatggggcaggaaggagagtcatgaaaatctgtgatggcatttatgattgttacaatgacaaagggcatttactgatatttagtgggtgcaaaccagagtacctatacatgctacactacacagtatagttttaaacaagaaagaaatgttccatgtcctacattaatttgaacatctggctggacatccatctgagcctggaacccaactttgcttaaatgaaatgacagagtaggttttgtaatatatggcatttttgcagagttttagtactcacaaaatattaaatgttagcatccacccctacctctgcttcttgattttactatactgctgtataaaaggttgaaagacttctgatctgattttattgctcctgaattctgactttttcatgctaaataagtgcaagcatataaacccttttttatatcctttagtatagtcatagactgaacatttacttagtaaacagatattatatgtttactttcctatttcccctttttatcctaaatagaccattttttaatatttaatccttgatatttttaaaatctgtgtaagttatattatccagggatttctagatttaaagagaaaattacagaatgcttgttattataaaggggctctgaaattgatcgggatgagaagcattactatagaaaattaagtaatacaagacaaattatttctctacttgtccccttgtgcacacatcagtgttggaatcattcaaagaaaaggacagggtcgtgattctaagtctttaatatagaatgcagtctcaataaattctgtatcattctgcttttatggatgtcttaaactgattttcttttggcaagttgtattagctagctcttctttgtatttgtcattgcagatggcgtttaatgattgcttcagtttgaactaccctggcaacccctgcccaggggacttgatcgaagtgttccgtcctggctatcagcactgggccctgtacttgggtgatggttacgttatcaacatagcacctgtaggtgaggtttatttccagtggctcctgggagcaaagttttagtgttcttgttacaggaagtaatcatgggtgaaataataaacaaaacaaaatcgaaataaaatatagaaagcagataaatccaactaatctaggtttagagaaggatattctaaaaccaaagcagcattgaagaaatcacaaaggccaattcacatgaaattttaaaacctctggatttaaaaaatcacaattaaaaagtaaataaccagctggggaaaatatttgccacaaacatggcaaggttcagtgtctttatgtttcacacaaataggttatttcaatttattcaacacctatttatagatcacctagtatgttctgaatgctattctaagtgctgggggtatacagacgtctccctgcatggtggagtttacattttagtaagcagggacagaccatgagcaagttacagaaatgttaaaattgtgataagtgatacagaaaaaataagaaggtaggatgagaagtgctgagggcagaaggtggtgggtgcagatgctgtgattttaaatgaagtggtcaggaaaatttcttaagaaagtgacatttgaggaaaaatgtaaaagaggtaaagaaaccggtcagatgctctctagagatatagtatcccaggtcaaggggacagcagacactaaaacctcaacaaacaaatggataaagaattaggaacagtttgtaaaagaagaaaagcaaaagctaatacaccttttgaaaaaatttcaactttctggcctaggaattgtaaaataaaccaataaaatatttcatacctatctcattagcaaaggttaagtgataacgatcagtgttgataagaatatagtgaaatgaacataaaggtattgttgatggtaatataaattgataagggctaggaccttaaaagggttcgtatcctctgaccctgtaattgtacttctaggaatctattctggggaaatatttagagatgtagacaagcatttctgtgtaaggatattcacttctgtgtcatttataatggttaaagtagacaatggcatattttcaataggggaatggttaaatgaattaagatttagccatatgatattagttatcaaatattctttactgagaaatcttcattgcatcatggagggaaactgcagaaagagctgaggtggtgccggcctcagagatgcctatatttaggggtttaaccactatttagactctctgtcacacatctgcatttttttctatgtgctgtcttcatttccccggactatgtctctttaaaaaactaaactgatgaccataagcagctttaggttctgactcttaggttcttttgatccaacacgaaagagctaactgtaactacctgttacagttaaagaatcacggagacagactccaatcactccagtgtgagccccatgttcatcgctggactatcactgtgcccaagagaatggaatactgtgattggctcagacacaattgtttccaggaataaataggcaatggtgggatttggtgctggatagatataaataacagcatccataacagccattaaaagtcttatatctggacatgttttattgcagggaagatggtcttaatatgatatttatttgaaaaagattaaccacatgcttagtcataaagcaagtctcaataaagtcaaaaaaactgaaatcataccaagcacactcttgaaccacagtgcaataaaaacagaaatgaatacaaagaagatttctcaaaactatacaaaaacatggaaattaaacagcttggtcctcaatatcgatgagtgatgcttaatatctagtgtca

SEQ ID NO: 64 - DNA, 4001 bp, Homo Sapiens
ttaggcaaatcctgtatgtttatagtactgttagatttctgttgacaaaataatccacaattctgacttcatctctctctctctctctctttctgattttgtttgaatttatgaggtttagttgcattttcaagttagtcttcctgctaactagtgattcttttgttgaacatttaaaaagggactgtcaggattgaataagagaacctcttccagtcacttttttttttttgagaaaggatctcaccctgttgcccaggctggtgtgcagtggtgcaatcacagataactgcagcctcaacctcttaggttcaagttccccctgcctcaatttctgagtagctgggactacagatgtgcaccaccatgcctagcaaatttttaattttttgtagagatggggcctcactacattacccaagctagtcttgaactcctgggctcaagcaatgctcctgcctcggcctcccaaagtgctgggattacaggtgtgagtgactgcatccagcctcttatagtcacttttaatctatcattggctttcccattagattgtactgttatacaaggaagtgacttcagacagtacggcactagactagaggctgtgtttttctttaataaaggcataaatgagatgaattgctctaaggctttaggcttgtcccttttctgagaagtgacctttgggaggtcacatttagttaaagcagttttgctagtataaatttaccaggatcctgacatgtaatcctgtatcattttcagtaaggttaaaatggtatatgaaaggaggtggttcacaaaatggattaatatcaacatggaacttcatgctttctaggtacctgctgcatccttggagattcaaaatgtcatcatggcattctaggctagactggcagtggagaaatcactgtgagttattggatttgctcaagataaaatcttgaatttgcaaataaatcctggtcagctttttttaacactcttgtggtaaataatacacaactcagattcatgtaatgggtgtaagaaaatcattgctttggttatttcagtatgaaactcaagagaaaacttactgaagtgtttttaaaattattctgaccacaacccaaggtaaaacataagccaaaaaacatatcatgacatagtaaatgaagccaggattgtatatatatgtctactcaagtatatgaaatggaaacaacagtttcagaggcagtactatgcttactacatttgaggcatttctggtattttctattctatttaattaaatttttagtacttcttattttagctacatttatttcataactcattaatgggttttgactcacagctcaaaaacactgccttagagaatccaaatgttcacactatccatatttataagaagtaattgttctggggttcttgtgtattcttatagcttagttttatttatttgctaagacctggctaagtgagaactgcaaagagttatgccttcaactacctaagccaggaattttctgaggtggcaggggaaccagggtgagcagaaggacatatcatccccaccctcattaagcttatgctatagtggatgaaataaactcagaagtcaaggagtttcagaagagaagtcattcccttgagtaactatgttaagtacgtaaacagctttagtagtgctttcttagtacaaggtgttttcttctgatctaggagagtcagtccaatttttttcttttgagaaaatggaggctcaaagagtctgtcatttatctccagtctcttcattattttgagtccaagtacaggattatttgtaatatacatgctgcctcacatgactaagtgggttttgtgatagaaagggaatttggagttgagaagagaaagtgatgattaagtcacatcattaaaatgtttgactctcagatatcttggaaagactttgaaggcactctagccaaactttttccttcagaaggagcttatctaattattctagataatagagaaaaactagttcttttaaagagacaaattatataccatttagtgtttcacaatattttctgaataaacttaaaatcccttatttggaatttaactcatctaaatccttatttcaaaaaccaggaaacagagtcaaacattttctcagttatcaaggcagtaaaccaaagattgtcacctgcacaggagaatctatgatttgttcttctcatcattatacatttcacgagcattgactcaaaaaaccatgctacctataaactaatcaacaattgcttcttctagggactgaaattttaaaatttcagacgtggaggatcgactctacttcaaagcaaaattcagtggacttctgcacacatatccattctaatctgttacaagtctgcactttggagattagttcatgctacacacttagaggtgtaatattttcctacttgggaaaattgaaattacttagatacaaaagagtggttgtagtaagaaaataggcaaggagaacattttaaagtgctgatcctcggtaaagccatacataggatgcacctgggagcagatctttctgaagtcattctgtgctcagagatgtttctccttaccttgctgcctatgtcaaattctctgtgatatgttcttagagccccatgacctctcttcttaacttgcagtgggagcttgaattttccatttatttttgtgaccatttagtctataagagtctccgtctttacagggccctcacttgactacagactccataaaggcagagattctatgtttactctattattactgtattcccagcactaagcactaggattaatacatagtaagtgttcaacagatgtttactggatgattagattggcattttaaggtagtctgagatcatgttttagacaagatacttcagtttagtccaatctttattatttattagctactaaagagaaattgataattactcatgatattcttcttttttgttttacagtcaactttgaccactttgaaattttgcgagccattgggaaaggcagttttgggaaggtgagaacaaattgaaatgattaaccaccagcagggttatgtagcccagggaacagagggtccagaaatgttcacattattgagttgctgggaccgcaaggaaagataattaagtgaaaatgtttttgtaatggatttttataaaattgtcaccacagtttaagaaaagcgtgtgacaggcagctacataatgaacatatactgttgtcagaataatctcattaaactcaaatctgtttactctcagtaaactttaaggcttttctctctaccctaaaggagatgaagatttcagaatcattttcagattctaccagctgtatgcccagtaatagttatcttgtttatggaagagttacttattttcatgtgggaaagaagtcacccgatttctatttgtttcctcatttgtctaatgtttttatcttaagaaaaatacatattcagtttaattttttttgcaagaaacttctgtattcaaaccctgattactagtttctcaatggagacatactttaagagaataatatttcatataaaacttgcattttaaaatcattttctgtttactttttcaggcattatacagacctctaaagaaatttcaaaaacatggacatcatatttagtgtttttccagtccttaaagtcctttttggttatatcatgtatggttgtaaacagaaattctttgcacagtattattcagcttgacagttcagtcatgtctatttcagtcactcaaagcaggattaaggatgttacttgttattggaatattcctgacatggaggcagctattttcaccaaaatgctgtcttaaaagcccaaaaagcaataccaggcaaaattgtttgagaaaaaagagatccaagaattgaactggtgcatagaaaagaaaatgaaatttttaatctaaaatcagagctaagtgg

SEQ ID NO: 65 - DNA, 2501 bp, Homo Sapiens
gcctctgcacccccatccttggcagacatccctcattggttgtgaccctctgtcctctgccccactggatccactgcagtgaggggcagagccaggctagaaccaagcctcttccttgcccatctggagctctgcctgctgtctcttcgtctcccagcaggctctctgcactagcatctgagcatctatcaaatgctcacttgctgtcatgtgcaggctctgcccttgaccgcagtgtaatttcccctggtctacagatcacatgggaacttgcagagcgggtgcacgtagggtggggactggggtgtctattcctccttcattattcagcagatcattagttcagtcacttgtccggatgtctaatatccagtcacacccacaagaaatacgcaaacatctgctcacaccccgatatagaccatcaagaatacacatatggctggtgccttaactgagtcatcttttttccattccattcatgaaagcaacataagaaagccaagagtgaaaggggtaaaagatcacagtataaaggtcttcggtgtgtccttcaaagatttacacaacattgtcctaaagggaagtcacagcagcttagctgtttctcacagatcagagaggatggtggggcagccaggagtcatcagtaaacccaggtgagcagtgcaggactgaatgtcgctgtccacttgcaggtgggagtccatgtggagggtgctccttcttgtttctcattgggacggtgactgtgtatagtggaaagcacagagccaatgagggacaggatggctgtggtggagggaaaacagtgcagggctgctctgtctctctgtcctgtcccgttaggactggtgggccaccacaggtttctgtaaagtacaaacacacatgcacatataagcacacacatacacaggcatgtaacacagacacacatgggcatgcacatacaaatacacaggtgtgtacatggatgtgcacatctgtagacacaaatttagattacacgtttgtgcacacatgcatgtgaggcaagagaatagggtctggaggcagggaacctaaggccaattcgtgctgacttcctagaactgaatcaaaatgaaaaccccacctctccatgcctgaggaacaaaaggttcagcagctactccctttgctataccccctttccactgcatctcagatgaaaatggaaagtacctcggattggtcccctcccgcaaccaaccagactggtcatcggccaagtcttcatgtgtaactttgtaacttcccttcagcctctgattggttgcctcctgcgactgatcacattggttggggccactccttcatctgcatagagtataaccaagtaaccaatgggaaaactctggagggcacttaaactccagaaaatgctgtaaccaggctcctgagccactggctctagcctgctcccactctgtggagtgcactttcttttcaataaatctgcgctttcgttgtggtaacacacacacttgggtgtgtatgcaggtacatacacatgggtgtgcacaaacacacaggcatgcacacagtacacacacacacaggggtgaacgcagccacacacatacacacatggacaagttagtgaaaccctgggtttgctttcttcacaatattaggtgaactctcttggggttttttacttaacctctctctgcctctgttttctcagctacaaatttgggttagtgacacaggtcctcctccaatggggtgtgtggacagcagatatttgaaaatttaaagctctaaaacacaagatattattctaatttcaaagtatttagattttcaagccctcgttggcaaagattttactttactttttgctttgattctcaggtctgaatctttgttttgtttatctccattttctttgctctgaagacttaattttaatacataaatctgacgggtcactgaactttaaaaactcctcagagaatgagagaaaactttaccgcgaaggtgtggctggccattcctttcctcgcgttggggtttctctgtgtcagcgagcctcggtacactgatttccgatcaaaagaatcatcatctttacctttggggaaaacaggaagagggatggtgctttatcaatcacatacttagcccaaacaagtgccttggcctcctcagaaatttaaaaggtagaaaaaaatggacatatccccttttaagaagcttccacatcacatattttttaaaaagtatttacatttcagctgtcatgcaaatcaacagttttgccaacttctttctcctttgctctggcactggcattaacattcttcctcactgtggccctggaaatcctcacactaatgaagcagcagaaaggcccatcacactgcactggtgtgtggtcttcgcatttccttgactttcttttcttttttgttctttcttttttttttttttgagacaaagtcttgctctgtcacccaggctggagtgctgtg

SEQ ID NO: 66 - DNA, 2501 bp, Homo Sapiens
tgtcccccatttgaaaaagacaacggcagcctccaccctagctgtcccacccaacatgaggccagattcaggggtgcagggatgctcccaaggttaccctaacagatgtgactggcacttcatattgggaccagccaggcctcactgaccaggcctatccaactagaactactccagaaggtggggctgaaacccaccaaggttcccagaacactgcactctagggcaatcagcctctgcatgggaggagaggagcaccctctgcaccaccccatggtgttaccaaaagttgaaccatgggttggttcaactttgcagagaagagaccacctatcccatctgtggaaattcactccttagcgacactaatgccctctaataaattcaatcctgggcctgagtgatggttggtgcaaaaaacaaattcaagatcccagtgtcctccagaagcctggatttccagggatcctgctgtgggtcacaggatgtcaccggtcccctctctctgtgggttaagtgtgggggccatgtggactccctcatgagcagatgccaccaggaccactggccccagcttcctccttcacagctgcagtgggggctggggctaggggcatcccagggagggtttttgtatgagcctgtgtcacagtgttgggtgttcggcggagggaccaagctgaccgtcctaggtgagtctcttctcccctctccttccccgctcttgggacaatttctgctgtttttgtttgtttctgtatcttgtctcaacttgtggtcagcctttctccctgcatcccaggcctgagcaaggacctctgccctccctgttcagacccttgcttgcctcagcaggtcactacaaccacttcacctctgaccgcaggggcaggggactagatagaatgacctactgagcctcgtctgtctgtctgtctgtctgtctctctctctctgtttgtctctctgtctgtctgacaggcgcaggctgggtctctaagccttgttctgttctggcctcctcagtctgggttcttgtcggaacagctttgcccttgggttacctgggttccatctcctggggaattgggaacaaggggtctgagggaggcacctcctgggagactttagaaggacccagtgccctcggggctgatgctcgggaatcacagagctgggacccagagccaggatccagacccagaatgaggtaggaggtggaggggctgccctgggcgtctgggggctgccagggactgagccctgagccagcctgagactcaggaaaccccgtcaggagggagaagggagaagcagactctggacaccagaaagccaggggaagggtcacaaaaggagtggatgtgacggaagggcgggctcctgggtctcttcagaacatatcccctgtgcccagggggatcagaggggcagagtccactgcgtgaaagccccactgctatgaccaggtagccgggacgtggggtggatgccagaaaagactccacggaataagagagagcccaggacagcaggcaggctctccgatccccccaggcccttgccccatacacgggctccagaacacacatttggctggaacagcctgagggaccaaaaggccccagcatcccacagagctgaggagccaggccagaaaagtaaccccagagttcgctgtgcaggggagacacagagctctctttatctgtcaggatggcaggaggggacagggtcagggcgctgagggtcagatgtcggtgttgggggccaaggccccgagagatctcaggacaggtggtcaggtgtctaaggtaaaacagctccccgtgcagatcaggacatagtggaaaacaccctgacccctctgcctggcatagaccttcagacacagagcccctgaacaagggcaccccaacacctcatcatatactgaggtcaggggctccccaggtggacaccaggactctgaccccctgcccctcatccaccccgcaggtcagcccaaggctgccccctcggtcactctgttcccgccctcctctgaggagcttcaagccaacaaggccacactggtgtgtctcataagtgacttctacccgggagccgtgacagtggcctggaaggcagatagcagccccgtcaaggcgggagtggagaccaccacaccctccaaacaaagcaacaacaagtacgcggccagcagctacctgagcctgacgcctgagcagtggaagtcccacagaagctacagctgccaggtcacgcatgaagggagcaccgtggagaagacagtggcccctacagaatgttcataggttctcaaccctcaccccccaccacgggagactagagctgcaggatcccaggggaggggtctctcctcccaccccaaggcatcaagcccttctccctgcactcaataaaccctcaataaatattctcattgtcaatcagaaatcttgttttatctcattttttcttttctcacatataattcc

SEQ ID NO: 67 - DNA, 2764 bp, Homo Sapiens
aattatataccctgcttcagagtccccctctgttgccctggagtgcagtggcatgatcatagttcactgtagcttccaactcctgggctcaagctatgatccccctgcctcatcctcctgagtagtgggtactataggcatgtgccaccatgcccagcgaattaaaaaaattatttttgtgtgtgtggagatggagtcttgctatgtttctaggctgttctttttttttttttttgagacggagtctcgctctgtcgcccaggccggactgcggactgcagtggcgcaatctcggctcactgcaagctccgcttcccaggttcacgccattctcctgcctcagcctcccgagtagctgggactacaggcgcccgccaccgcgcccggctaattttttgtatttttagtagagacggggtttcaccttgttagccatgatggtctcgatctcctgacctcatgatccacccgcctcggcctcccaaagtgctgggattacaggtgtgagccaccacacctggcctataccttgcttctttctctttctttccttttttttttttttctggagacagtctccctctgtcgcccaggctggcgtacagtggtgcaatctcggctcacttgcaacctctgcctcccgggttcaagggattctcctgtctcagcctctcgagtagttgggactacaggcttgcatcgccacacctggctaatttttgtatttttagtagagacagggtttcaccatgttggccaagctggtctcgaactcctgatctcaggtgattcgcccaccttggcctcccaaagtgttgggattatgcccttccttccttccttccagacagggtcttgctctgtcacctaggctagaatgcaatggcaggatcttggctcgctgtaacctttatctcctaggttcaagcaattctcctgcttcagcctcttcagtagctgggattacagacactcgctaccacgctcagctaatttttgtatttttagtagagacggggtttcgccatgttggtcaggctcgtctcgatctcctgacctcaggtgatctgcctacctccctgcttctcattgaggtctctgccagtcaggtatcagcacagggaaagggctcaagggcagtgtgtggccatggccctgtttgcagaagatggcagtaggagcaaccctttctacatttactcaacacagccgcttatgaccagcctggttaggcctcagggcagtgtgcggagactcactgtgatcttagctccaggtgctcctccagctggagaggcagcctacggctgatcacagtgcaaggccagatgtccctttctgtctctgtgacggcagaaacgaggtctgtctcatgactctatcccaagcacttgtcacagtggtgcctctgaatatgttacgggtcattcactcatccattaaatatcaagcgcccctacaacacctcatggggacttcactttttattttgtttttgagacagggtctcaccctgtcacccaagcttgagtgcagtggcttgatcatcgctcactgcagcctccaattcctgggctcaagtgatcctcctgcctcagcctcctgagtagctgggactacagacacacaccaccatgcctggctaattttttttatttttttatttttgtagagacggagtttcatcgtgttgcccaggatggtcttgaactcctgggttcaagagatctacccacctcggcctctcaaagtgctgggattacaggcatgagccatggcaccaggccaagcttcacttttaccgggaatggggatgatgaaggctaggagcgtcccggtctggagaagcccaggccccttagcctttcttctgatggagccacaactgccagggcccacctctcccacccactcacaagcagggctcacagagcagagcccccgatcagaagcctctccaaggccaggctgcagggaaggcaagcagaaagagtatccactgttccaatctgattttattgaaaaggaaacatacaaaaatcatgtacaaaaaaaattaaccaaacatgtacagaaaattcattccggtatctacagcagcgcatatacagtatcttacaggctgggccatccctccccactcccagactcctccctcttccgagatttccccccctccctgactccccgtcttccccccagcgcttggccctggggactaaggctggggcggcttcagccaaaatctcccaccccccaaatgaatgccagtggtcacacgtgctctctctaaacctatgcaatgggattgatggggcggggggcggtcacgggcagagcacaggattcacagtctgggcccctcctggccaccccctgatgaaggtgaggcaggcatgcccaccacccgccggctggctcagggaagatggctgggcgccgggctggagcaaccggcaaacgagccccactctctggctccaggaggctagtggtcacgtttggctcatttgctcttcacgggccccctcccaggaggagggggggaagcaccaggggcctgaggccaggcccagagtgaaggagcaccgagaggagagcccccccctcccagtgtcacccctgcagctggaacgggcaccagcacaacagcctttcctgagatggtggtgggcggcagaggcgggcggctcagtccccaccccctcggtcaccgccaccttccgatgctgagtccatcagccgtccctctcctggcttcttg

SEQ ID NO: 68 - DNA, 3001 bp, Homo Sapiens
agatttgcacctggtcctcagctcaactttcatctaccactgctcccctcatattacctgattgcgtctccccaaatacaacatctccatgttccatgcaatcccgtaaagcactgagccaaggactggagatgccaacaatggtcctggtcctcaaggggcttcctacctgcccctccggccttcccccacccaactacctaaaacacaggcagagaacctctgaaaacacagcagatccaaccattcccctgcttgaacctttcggtggcccctaatgctcagagtgcaaagtccaggagcacaaggctctttctcaccttcccacaaactaccccgtgactccaggctccagcccagagcccggacagcccctgccccagcctttgcccaggattctcccttggcggcaactttccctgtggttctgcagcatcatctcccagtctgggtcagaggcctctccttagcctcttagcccccaagcctctccccgtaactgcacctatcaccctcaaaccattgtctggctgcctgtctcctcccacactggtccctgagcagaaacaaggactaatccatgtttttcagctcctacccctaatgaaataccctaatagatactgaaaaatgtttttgaaccaatgagacaagtctactgataataaacaggcaaataacagcaatgtgctaacagtggctgtttctggtgagcagaattttgaggtctgttcctttcacttcttggtatttcggttgtttctgtaatgactgtatcttgcttttgtaatcataaaggacagtaaaggaaacttcattttgaaaataatacaaagggattcggggacttcaaaagaaggtgactctcctcgtccactccagagaatcaggaaaggagtgtttaaagacccacagaattcctacaagtgacgttgggggggggccagccagccagggcgcatgccggccagcgagtggggtgggctctgggtccgggagaagtcagatcagtgctctgtacagggccttgagggcaagacgaggaatttcgacttaggtccttgaatctggagagctacagaaagtttgtgagctcaggagaagcgctccgagctcggcatctggagcagttcaaggcagcagcgagcaagtccaaagacgcaggagggagggtggggtggaggagtagagagaaaacagaagccgtctacagaccctttttccctctggggcaactaaacctcaagtgcaggaagcgcttggggactgcccagccctcagctgtgttattattcggtgataggtatttgctaattacttccaaaagcctcccatctgtcatcccacccagactgcgcgcttctaattcctcctaccccacatgctgtgcccaatgaaaagtatggtcagcgagcgaaggtttgcaaggagacagacgagggcgaaattaagccaggcggcttccctttaaatcctcgcaaagcagaagggcccctcactctggcagcaggccttggccaaggggcctttagccctgacgacccggggaagagtctcccaaagcagaacgcccggtccggcgcccagaccaaacgcgggggaaccggaagggcgaggcctccacgtaagtccgcggtaaaagtggcagggagtggctgcctgcaaagaccccaagacggcttgaagaaggagtgggtggcgggtgggggttagggcgactaggcggggaaacagggagagggtcgggctccgcggggcagctggggccggggctcgccgacctgggcgggggcggggggcggggggggtgcggcccgggcggggccggtggggcgggaggcgtggccggcggggggagtgggggcggcttttcccggcacatgcgcaccgcagcgggtcgcgcgccctaaggagtggcactttttaaaagtgcagccggagaccagcctacagccgcctgcatctgtatccagcgccaggtcccgccagtcccagctgcgcgcgccccccagtcccgcacccgttcggcccaggctaagttagccctcaccatgccggtcaaaggaggcaccaagtgcatcaaatacctgctgttcggatttaacttcatcttctgggtgagtgagcgcgactgccgcgcgctcctctcagggcccacctgttcgcgggccccggacactggccgcggccgcgagtgccggcagctggcactgcccgcaccgggcaggcaccgggcgggaagagagagcgccctgcggctgccagctggctccaaggccgggtccagagccgggcgggacggccgcgacgggcgcattcgggtgggggctcatcaccgcccagccggcgtggggagccgggccctcttgagatgaggcgtgcgggagggtcctgagcactttagctcgcctaggatttgagctggggtgtgtgtctgctcccagctcaagtccctccgagtgccagagaggaaggcagggagaagcggagcacccctctttgggccaaggccaaggaggactgtggtgagcagtatggcttgtgaccgggtggggtctcccaggtagtagggggcgccaggaagggagggtgcgggcacggcgagagctcagccaagagcggctctcacttttacgcaggagcggcaggggtgcctcggccgcgggtccggccccgggacccagtccctgagagtcgggggcccctccacccttgaggaggaacctcgcaggcccccgttccctcagactttgattctgagccaccgtgagagcgccgaactccctggtagctccctgaaagactagcttgtcttgatttctttcaaggacgataagtatcttcactggagagaactcagagttcgggagaggagggggcagatacctatctgcgcctctagtgggatgagtcctgtgtgtgcatttccgggagagatcaggtgccagccagctgcccgcccaggagagccttggccttgccctctcccctccccgccagc

SEQ ID NO: 69 - DNA, 3001 bp, Homo Sapiens
gcacagataatacagtttgaagaagtaagactggtgttggatagatcagggtggcatagttattaatttactgtacatttcaaaacagctagaagataattttgatggtgcctaaatcctgtaatcccaacacactgggaggatcagttgaagccaggagttcaagaacagcctgggcaacagtgagatttcatcgttacaaaaaaatttaaaaattagccaggtgtgggtagtgcacatctgtaatcacagctactcaggaggctgagacgggagaagcgcttgaaccagggaggtggaggttgcagtgagctgagatggcgccactgcactccagcctgggtgacagagcgagactccgtctcaaaaaaaaaaaaaggccgcgcgtggtggtgggcgccctgtaatcccagctactacttcggaagctaaagcacgagaatcgcttcaacctgggagatggaggttgcagtgagctgggatcacaccagtgcactcctgtctgggctgtagagtgagactctcaaaacaaaacatcactctggcagcactgtagagaatgaactggtagggtcaagactatttggagacttgcaataatatttcaggcaaaatacgaggaaggcttaaactagggcaatgaatgaaggctggagagaacatgggtttgaggaagtttaaggagatagcatctgcatacttggttgccatttgagtgaagtgaaaggagaagtggtatcgaaaatgttatttggtgtgtttcgcttggagataattaattcgaagtgatgcctgctgtaacaggtgtgcatagtgctgtagaggatgcttacagttcagcttagggctggttggaagtaacatgtgggtcctgaagtcagtcggtctgggggtcattgtcctaaacagagaagataggaaggaataggagctgagcatttagaggtattcttctttgtggtttaatattatacccatgggtcatcctcaaaagatgtgcccttatttccccggggactttcggaaaccccgctacgaccccgcggaacgttccgtggggaagcttctctaggccaccagagggcgccaggcgggccgcagcgactccagagtcgcgttatggccgaggtgcgggtgcagctgctcctgtcccggcgtccggagtcggtgagcttcgcacggagtgtgtgtggcctcctgggagccggaccagggctcgggacgtggcccattcactgcagcttgaagcgaggacggcttgtcctctcgagcaggcccttcccaggcgcctccgctaggcttccgctccaggtcggcagaagggggccccagagcgggggcagtgaagggccaaagatggggactgaaatcgggtgggaactggcggcgaggaccccgcccccaacgcgcggtgtagccccatttttggaagtcacgcccacccagtgccgcccttctgaagccttaacccagctggcttccttctgccagcgaccccctttctgcccttttgcggccctggaggagcggcccagggtccctggggctgagctgcccacagatcgaggtgtggacctgggtgtggccgtcattctgcagtccagcgacaagactgtcttgctaacccgaagggcacgcaccctgagcgtttcccccaacctctgggtacccccgggtgagtattctggggacaaggccccaagtacagagaagaaatttgccctttccccgcaacaatgtttttcccagtctcagaaggataaagtgggccccaaaatgtggcatgttcatagtcacaagggactgcaactccctctgtgtccactggaggggagaggagtgtcaacagtgagtgggggctccctggccaagaccaccaccattcacctactggccccactgttgttgcaggtgggcacgtggaacttgaggaggaggtaaccagtcagctgatccaacctgagccaagagacccatgcctgggaccatcttgggtgtgggctgagggaggggcaagcaaaaggacttggaagagtcaggcactggcccctctgatgtgtcttctctgactcccagctgctggacggagggcttcgagaactttgggaggagagtggactacacctgccccagggccagttctcttgggtccctctgggtttatgggaggtgagacaagtagctgggagaagctcctccatagatcagcccctacctgccttggctacaagggaaacaatagcacataagtgggctggaatccccaaatccataaccctcacccatgtccctgctgtgtcatctgtaccatccacgccctcagcttttggccaccattttgtttcaccctaaagctgtattaacaaagtctcaaaaagtgacacaaagggccgggtgcggtggctcacgcctgtaatcccaacactttgggaggctgaggtgggcggatcacctgaggtcagaagtttgagaccagcctggacaacatggcgaaaccccgtctctactaaaaatacaaaaattttagctgggcgtggcggcaggcgcctgtaatcccagctactctggaggctgaggctggagaattgcttgaacccaggaggcagaggttgcagtgagccaagatcacgccattgcatgccagcctgggcgacaagagcgaaactccatcttaaaaaaaaaaaaaaagtgacggaaagttctcacttttgctgttttcttttcctagtctgcctaccctcctaggctgagctggggtttacccaaataccatcacattgttctgtatctactcgtgatctcccaggaatcacagcagcagttgcaggtagggctggcagtgagggaaggaaacagggctcaggggagcccaagcaacctggttctgactgtgattaggagctgggcgggggtggcgggggtagtcagagataacgaagaatatgcaatgccctttccccttgctcctgcctttctccatgaaacctgcgggtaggttttg

SEQ ID NO: 70 - DNA, 2457 bp, Homo Sapiens
cttatatacagaacctttttttttttaggcagtcttgctttttcacccagtctggagtgcagtgctgcgatcttggctgactgcaacctctgccccctggcctcaagcgatcctcccacctcagcttcctgagtggctgtgaccaccagtgcacaccaccatgcctggctatttttttttacttttcatggagagacgggtttgccatgttgtccaggctagtcttgaaccaagcaatctgctggcctcggcctcccaaagtgctgggattataggtgtgagccaccatgcctggcctgtttctgaagaaacttaagagcctaagcaagtttgtattgctgagcaccaggattgggccctggcttcaacgaccggatcttgaaggcagctagctgacttgcctccagtcactacatgaaaggcattctatttttttttttcttttttaaatggagtttcgctcttgttgcccaggctggagtgcaatggcacgatctcggctcgctgcatcctctgcctcccgggttcaagtgattctgccgcctcagcctcctgagtagctgggattacaggcatatgcgccaccacacccagctaattttgtatttttactagagatggggtttcactatgttggtcaggctggccatgaactcctgacctcaggtgatccgcccacctcagcctcccaaagtgttgggattacaagcgtgagccactacacctggcctacaccaaaggtattctataatccactttgccttgctgcttgggattctctgaatcctgccttttttctactcattcactttgacctccccagagttagtctttgtaagttgggaacatagcatttaaatgctaaattggcatagaatgatttcatctactggcataggtgaaatttttataaataagtaaagtcctgtaaaaccttgtaagatttccaaggaaaagatgctatgaaggatgaggaggttatcaagtctttgggagttgtattaatatcactaggattttttcttgaagaggtttatttatttatttatttatttatttatttattttttgagacagagtctcgctctgttgcccaggctggagtgcagtggcgcgatctcccctcaccgcaagctccgcctcccgggttcacgccattctcctgcctcagcctcccaagtagctgggattacaggcgcccaccaccacgcctggctaattttttgtaattttagtagagacagggtttccccatgttaggcaggatggtctcgatctcctgacctcgtgatccacccgcctcagcctcccaaagtgctgggattacaggcatgagccaccgcgcctggccgaggtttattctttgatgaaacaaattcttgagtaaatataattctggaagagattaaaacccttccaaagtggattaggagataataactaactaactttccagtgtttaggatggtgcctagcatatactaaatgcttataatgcatcgtctctttgaatcttaacctttagagataccattatccaactttacagatgaggaaataagtgattatatataacccctgggttacccagcttaccagtggcagagttgaaaatagggagtttcagtctagaaaatgctcttaattcccataataagggcaagagaatctcgatatgtgatggtgtgtccttgtttaacatttataagatggtgtagcaaatagtggttagggttctagctcttccacttactagctgtgatattggtcagttaggctcaagaatctgtctcagaaagacagtaactgctcaaattatagcttatatcacttatggcagtccagaattaaagcaggcagtaattaaggtggaaaagccttcagtcactttaaaaagcgttaggctcacttcagttggattaattcctaccacagcacacagataaacatctggagagaaaacaagacttacggccctagaagaaatcaaacaaggatgctgcattgtaccttttaattgcatgggtagttttaaataaatggagaaagcacctttcagaagctacactagcaggaaaaaattccatcaagcatttacatagtaaatttctataatttcacaaaagattcttgatcttacttgaagtatacatgagggaaagagccccctcagcaggtgttcccgttgcttacagaagcaaactaaaggacctaaaactggaggcaagccaggatgccaaaaagggggaagagaaatgataaagaaccattcataaattccatgtctacttcaagacatttgtctaatgacccttacataataagtattttagggaaaactaccacccttttaagataaaagtacaatcttaaaagctgtagttctcaattatagtaatatttcttacttccagtaatatgtctcaataccttggactgctggatgtcaaaagacaa

SEQ ID NO: 71 - DNA, 2501 bp, Homo Sapiens
aattaaccaggtatggtggcgtgtacctgtagtcccagccacttgggaggctgaggcaggagaattgcttgaccctgggaggtggaggctgcagtgagccattattgcaccactgcacccgggcctgggtgacagaatgaaaccctgtctcaaaaataaattaattaatttaattaaaattaaaattaataaatcttaagcctaccagcttccacgtaggcctcatgcaatgctcactttgggatttgtcctctcaggaccctactgccatgctctaagaagctcaagccacatcgagaggccatggtaagcactccggctggcagttctagctgaggtcccagctcacattcgatatcagttgccacgcatgttaagcaagctaccgtagaagttgagtttgttcaaacattcagattactctagctccgatttccacctacatggaagaccccacgtgagaaccatcaactaaacccagtctacctgcagaaccataagagataataaatttttgctctcggccgggcatgatggctcacatctgtaatcccagcactttagaacccgaggcgggcagatcacctgaggttaggagttcaagaccagcctgaccagcatggagaaacccgtctctactaaaaatacaaaattagctgggcgtagtggcacatgcctgtaatcccagctactcaggaggctgagataggagaatcacttgaacccgggaggcggaagttgcagtgagcagagattatgatgccacttcactccagcctgggcaacagagcgagaccctgtctcaaaaaaaaaagaatgtacaatataatatagaatgtgttgtatagaatacaatacacttgttttctgaaaacaggtgtactgcctgtcttggtccattttgtattgctacaacagaataccacagactggtattcaaaacaaaacagatatttattggctcaccattctggaggccaggaagtctaagctggagggggtaacacctggagaaggccttcttgctgcatcatctcctggtggaagagcaaagagagggagagaaataaaaggtggggggacaaattcatccttctataaggaacccgctcctgtgataacagcacgaatccattcattacagcagagccctcatggcctaatcacctgttaattactattgctttggagataaagtttccaacacatgaactttggggaacacattcaaaccacagcactgcctatggcctgtattctttttttttttttttttttttttttttgagacacagtcttgctctgttgcccaggctggagtccagtggcccaatctcagctcactataacctccatctcccaggttcaagcaattctccagcgtcagcctcccgagtagctgggaatacaggcatgtaccaccacacccagctaaattttttgtattttttggtagagacggggtttcaccatgttgaccaggctggtctcgaactcctggcctcaagggatctgcctgccttggcctcccaacgtgctggaattacaggtgtgagccaccgtgctcggtctaacaaggaatcttttaaataaagctttgcggggtcgattagactaattcatatctcttgagtagatcctggtacaactcattacttgcagtattgaatgttaaggtctgtcctttattctgaaattatacctttcctcctttattggaattgaaattttatctttttatgaaatgatagtgatggtggatggtatttgccttttttaatatctttatttgacaaaataaaagtcagcaacctatctcgatttccaattttttgctggtgtttgaaattccaaaattgagacctaaagcatagctctggccttggagagatttccaggagagtcagagcccagaagggagcaggatccaggaggccctcatctcccagcactccagctgagccagccgggttatggaacatcactgagcaattaaaatattatcaacagacaaaaaaagtttattgaatacaaaactcaaaggcatcaacagtcctgggcccaagagatccatggcaggaagtcaagagttctgcttcagggtcggtctgggcagccctggaagaagtcattgcacatgacagtgatgagtgccaggaaaacagcatactcctggaagtccacctgctggtcactgttctcatccaggctgcccatcagcttcttcagcccctcctcatccactttctcctgaaagtgacaggaaatacactcatcaccaagccagccccaaccccagctccaccaaacacccagaccctcacacattcaggttggttcccagctctccctccccactgggcagctgggtataaggtgggcaggaggccctgggagctaccaagagggcccagtgagtaaggagagagacagatactcattggtgagcatctccagtgtgccctcctcctggacacagggaggacactggatgctcctct

SEQ ID NO: 72 - DNA, 2501 bp, Homo Sapiens
tgcatcaacctgtgtaaaacagcacactagatgatggggatcaaaagccgaatactaatcccagtactttgggagaccaagggaggcagatcacctgaggtcgggagttcgagaccagcctggccaacagggtgaaaccccatctctaccaaaaacacaaaaatgagccgggtagtggtagtgcatgcttgtaatcccagctacttgggaggctgaggcaggagaatcgcttgaacctgggaggcagaagctgcagtgagctaagattgcgccactgcactccagcctgggtgacagagtgagaccctgcctcaaaaaaaagaaaaagccaaatacttggagttcttgccctctagggaagcacggtccagaaagcctttaaccaggaaatccaggagaccttgtgccaccaaaccccactcagaaaactggctgttcatgcagagaactcatgctgaccatatcttgaatttttctgggcacttcatatattctgaccaattgtccccaaaggctgtcaatcagtggtgcatgttagtaacaccgagggagcttttctaaaaccacgagacctggagccagccctgacctgaatcacaatctctacaggtggagtgtaggtgtgcatattttaaaaggtcctcagatgactcgattaagaaacactgccccaacccattaacacagcttggcaattctaatttttgatacccaattatctcccaacctgccttctacaccccagcttttcagaacttgatgttttgttcaaaatatatagtcacccccattaggacatcatccagctttgagattctgggccccctaatcataggcatagcaatggctggtcacaagctctgttaacacactgagaaaattccagcatcagtcccacacacagatgatgggaaattatgttttttgtttcctgaatgccacagagtcaagctggcattctggataagcaattttctttctttatttatttttttatttatttgaggcgaagtcttccctctgtcgcccaggctggagtgcagtggtgcgatctcggctcactgcaacctctgcctcccgggttcaaatgattctcctgcctcagcctcccgagtagctgggattacaggcacccacccccacacccggctaatttttttgtatttttagtagagatggggtttcactatgttggtcaggctggtctcaaactcctgacctcaggtgatccacacacctcggcttcccaaagtgctggattacaggcgtgagccactgagcctggccagcaattttcacttacaggtcttcttcttcttttttttttttttttttttttgagacagggtcttgctctgtcacctaggctggagtgcagtggcacaatcagctgactgtaaacttgaactccttggcttaggatcctcctgcctcagcctcccaagtagctaggactacagacatgtgctaccacacctggctaatttttttattttttgcagagacagggtctcactaagtttcccaggctggtctcaaactcctgggctcaagcgattctcccacctcagcctctcaaaatgttaggattacaggcatgagccactacacctggccacaggtgttcttcttggttgaggtcagctcaaggattgttgggggcagagtgaagagactgttgtggagttaaccctaaagaagaccaccatgtacagctgtacaagatgtgcactgcacaaaggcatcaggttaaggaggcaattgggagctgacactaagcctgtacactacttacacagccatgggattgtggtttggggaaactttgtatacattaagtgctgtggtggccctgccctacagctctcctaacctctacctcccaaagctccattaagtccagagatgcagtcccataagaaactctagggtgcagtccacctttgttattttctcctttttatgtactccaactccttcccatacaagcaccagggagatttgtcatcagaaaaatcacattttattgatcacttttatttaaaattacaaaaatataaataaaaatagtgaaatataaatattcagtgtacaggagtggtcctcaccccacccagtgaggattggatgaactaggctaaaaggaagggataactggccaagaaagggacatctatgtgaaagtgaaactgagacagtgctggtcacaggtcatgctgcagaataatacattcccaggcactgtcacgtgggggacccaagaggccccaggagtgacctataacctctccagaaagaccactctgtgtggcatcacagtccacacagtttaaggaaatatttagacttaacaatcagacaccagctcttactcacacttacactcacagcccacacacaagtgtgcaaacatacacacacatatatatttcctgatacattcatggaatatcagagccctgccctgaagtcgttagtgtctctgctccccaaaccgctgc

SEQ ID NO: 73 - DNA, 2501 bp, Homo Sapiens
gatgttaaaaatacttttttcttgggatgacatttgtggggaaaatatattgaaagccttttcaataagatttaatgcaaatgaattactgacacataaaggtgttatttaatatttaaagttagtacctttgtgctgcatgggtatcagtaaaattatatgtaaatgttttgcacctacctagtatacgttgagtgtacaaatattaaaatgcctatttatcaggcactgtaatttatacctactactggactgtaactttcctgagttatatgtctttcttcagctccaaattctcataaggcttattagcacatttttcttgtgctaataccaggtattcaatcaatatttgttgaatgaaattagaaatgaagaaagtttttatgctgaggtttacagtacaaaacaatttaaggctacataaacataagaaataattgttttgtggaattttgcttagggagagaaataatattccattcattcagtttaaaaacttagaacaaggaatctaaagtattgtccttaagacacataaaatacacttctattcttctatgttatagtcagtaaagggagagatctcacaaagtaggaagcaaaggtggaaaatttaaaagtaatgaagataattgatggagataaagcatgggagaagaaagtgataaagtcatgggtacagaaatatgcagaaatgtaaccaaagaatgatcgaaatctacagtaataccaagacagagagaaaatgtcattcaactctcagtcagcaaacactattgaccactttatatggctcccagactcccaggagagtcacaattgtaaaataacatgctactgtaactcaaatgtgcacaaaatggcaggtaaactctaggagaaggcaaattactgcttggaagactcagggaagattttacagaaatgacatttggctgagtctcgaaggttgaaacatgcatggaatttgtgtcaaagggggaaaattctggaagaaatttcatggtaaaaagatttgcatggctgaaacataatatgaattcatgatagtggaggataaagaggagaaaggtatgtgaattgatacctccctcctcctcctctccctttcttctttcctttgatttgaaaagatgttaataagctctgacccaaaggagcaattggcaggaaagatattttactactttcaaaggtgagagaattgagaatcagtaagagtgactaactttcagcatgccacagttggtaaggagtacagttaggccataatcttctgatttcttatgtccactcgcaatacctcattagaggacaattctctccccaaaaaaggttattttaaaaacctacaaaacccacaatactatttgcataatgatatgaatctacttattaacttcctaagagatttgtgtttccaatctggaaaatggtcttaacatatgagttgttttgcctagtttgaagaacatcaatctattttagtggttttaaactctttctacattttttgcattaaaaatacttttgaaaatctgaggaaagttatgaatttcctcctcacacaaatatatatagacaaaattttgcataccattttaaaggttcatttttggaaatataattgacacaaagggagttacctagaaataacatataatagctttgtgttattacatgtaagattttttctcttaagtcgatgatttgttagatgcaaaagttaaaaatcctcacctacatggtatgaaataatatggataagatagtttactttaacaattttagtactttttcaatcttgtaaattcttcaagaaaatatgggtaaacaaaacagttaaacattctaattatactttataaaagaaaataattagaacctcacaatttttcttttaaatttacacactatgatgttataaatgtaaggctttcagaagaacattataaaaactcaagacctcataatcctgaccaaaacaaaaagacataccacaaaatttaattctttaaaagaaaaagatgacattcactttttatgaaagagaaggggtttcaccatccctgccaatatcttgggtaattgtgcagcaataacttcagacatcatttctggaaattcaacactcagtgcccgggactggataaatgtattcaagcagtacagatgaagttgtttgacaagctgttggtttaacaaatgagtagaaaacatgtaataaaaataataaattcatatgctattcaaacatggcaatttatttttctaactatttataatataaatacttctcaaggtgtttttttcttaccatagtgaaaataactcccaccattttctagaataatatgtaaaatgttatatactcatgatagaacattctgatattatggaaagatttatttaaagaaatgaaagttattcacaattctacaggataagctgtgtgaacattttggtgtattactcaagtttttttttctttttataca

SEQ ID NO: 74 - DNA, 3001 bp, Artificial Sequence
  chemically treated genomic DNA (Homo sapiens)
gtattagtttatttgtgtgtgtgggggagggttgtattagtttatttgtgtgtgtgggggagggttgtattagtttatttgtgtgtgtgggggagggttgtattagtttatttgtgtggggggagggtagtattagtttatttgtgtgtgtgggggagggttgtattagtttatttgtgtgtgtgggggagggttgtagtagtttatttgtgtgtgggggtggagggttgtatagtttatttgtgtgagtggggagggttgtattagtttatttgtgtgtgtgggggagggttgtattagtttatttgtgtgtgggggtggagggttgtatagtttatttgtgtgagtggggagggttgtattagtttatttgtgtgtgggggggagggttgtattagtttatttgtgtgggggttgagggttgtattaggttatttgtatagggcggagggtagtattggtttatttgtggaatgaaggttgtattagtttatttgttaggggagaggaggtttgcgttgagattcggttgattagaaaggggagaaaagagggttattttgattgttattattttaaaacgtttaatattgttacgatttgaaaggaagagttaaggtatttgtttagtagtttaatttttaagtttatttttgatttgaatgttgagattaaggatgagaaatatttttttgttttatcgggattgtttatttagggaattttttttattttttattgatttatttaaggttgtatttttttttttgatgaaatatttaatggggttatttatttgtttgaataggttttgaggaaagttttttttcggtattttttttttttattgagtataagtgtgtttcgtagggcgaaggggaaagaaagtggattttttttgtcgatattttttaaatgaagtcgtaagtgatatcggtggtgtagatgagggtttggtatttcgttagatgtatttgttagttttttttttttatatggttttttttttgattattatgatgggtgttttatgagggagttatcgtttgtatcgatatttttttttttttttcgtggtggtttatttttgtttatttttttgggtttttcgttagtattttttttaggtatatgttttatatgtttaggtagaaggtagggttgttgtttatgtttcggagttttttatgtatgttataggtttgtttttttttgattttttattttatatggaatttagattttcggaatgtttttttgacgttgaaggtttaggattttgtttggtatcgggtagtttataggtatttttttttttttttttgagatagttttattttgtggtttaggttggagtgtagtggtgtgattttagtttattgtaatttttatttttcggtttaagcgatttttttgttttagttttttaagtagttgggaatatcggtgtttgttattacgtttggttaatttttgtatttttagtagagacggggttttattatgttggttaggatggttttgattttttgattttgtgatttattcgtttcggttttttaaagtgttgggattttaggcgtgagcgatcgcgtttagtttagtgagaattatttaaagattttttgattatagaatatatagtattaagggtgaattttggttttaattgtggattttggtgatggtgatgcgggtagatttagcgattgtaattagtatataggttggttttaatttgtatattttggtgtaggatgtcgatggtgggggattttaggggtgggagagataggggtatattggaaatttttggattttatattcgattttgttgtgtattaaaaattgttttaaaaattagtttatttttttaaaaaagttttattgaatgttttgaatgaatcgtttttagagttggaaggatttttaatagatgatattttaatatatgttgtagttggtaatgtttaggtaatttttttttgttttgtgttttattgttgtagggtgtgaagaagtttgatgtgtcgtgtggaggaagagattgtagtgggggttgttagtgttattttgagaaaggtggacgtgtaagttatagtattgtaataaataatattattttttttatatagttatgtttcgtttaataacggggtattttttgggatacgtgtggttgggtagttttattattgtttgaatatattggagagtatttatataaatttagatggtcgggtttattatatattcggttgtgtgataaagtttgttgttattaggttataaatttgtacgtaggtagttgcgatatagtattatttgtatatttaaatatagaaaaggtatagtaaaaagaaagtaaaaagatgtaaaatgggatttttgtgtagggtatttattatgaacggagtttgcgggatttggaagttgttttgtttgcgttggggagtgcggggtgcgtggatgtgaaggtttggggcgtgatcgcgtattattgtagatttattaatattgggttttaggcggttttaaatttacgtttttaatatttttttttttttagtaataaattaattttagtttattataatttttttattttataaattgttaaattttttaaattttttgattgtttttgtaataatatttagtttaaaatatatattgtatagttgtataaatatattttttttttttacgtttttattcgatgtttttttttattaaaaaaatttttttttattttttaaatttttttgttaaaaataaagaaataaatagatatgggagtttgggtttatacgggtttaggataattaatattattgttttttatttttatattttgttttattagaaggttttcggggtaataatacgtatggagtcgttattttttttgggaataatgtttgtttttggattttttttgaagtatttgtttgaggttattttatagttaatatatgtatatatataaataggagtatat

SEQ ID NO: 75 - DNA, 3001 bp, Artificial Sequence
  chemically treated genomic DNA (Homo sapiens)
gtgtatttttatttatatgtgtatatatgttaattgtaaaatagttttaggtaggtgttttaggaagaatttagaagtaggtattgtttttagaggggatgacggttttatgcgtgttattgtttcgaagattttttggtgggataagatgtggaggtgaaagatagtgatattgattattttgagttcgtgtaggtttaggtttttatgtttgtttgtttttttgtttttaataaaaaagtttaaaaagtaaaaaaaaatttttttaatagaaaaaaatatcgaataaaaacgtagaaaaagaaaatatgtttgtatagttgtataatgtgtgttttaagttaagtgttattgtaaaaatagttaaaaagtttaaaaagtttaatagtttataaagtaaaaaagttatagtaaattaaggttaatttattattgaagaaagaaaaatattgaaaacgtaagtttagggtcgtttaagatttagtgttgatggatttatagtggtgcgcggttacgttttaggtttttatatttacgtatttcgtattttttaacgtagatagagtaatttttaagtttcgtaagtttcgtttatggtaaatgttttatataggagttttattttatatttttttattttttttttattgtattttttttgtatttagatatataaatagtattgtgtcgtaattgtttacgtataggtttgtagtttagtagtaataggttttattatatagtcgggtgtgtagtaggttcggttatttaggtttgtgtgagtattttttagtatgtttaagtaatgatgaaattgtttagttatacgtgttttagaaggtatttcgttgttaagcgaggtatgattgtatgaggaagataatattatttattgtaatgttgtgatttatacgtttattttttttagggtagtattggtagtttttattgtaatttttttttttatacggtatattaaatttttttatattttgtaataataaaatataaggtaaagaaaagttatttaaatattgttaattataatatgtattaaaatattatttgttgagaatttttttaattttagaaacgatttatttaaaatatttaataaggtttttttaaaaaaatagattaatttttagagtagtttttggtgtatagtaaaatcgagtgtaaggtttagagatttttaatatatttttgttttttttatttttgaaattttttattatcgatattttgtattaggatgtataggttggaattaatttgtatgttggttataatcgttgagtttgttcgtattattattattagagtttatagttgagattagggtttatttttggtgttgtatgttttatggttaaggagtttttaaatagtttttattaggttgggcgcggtcgtttacgtttggaattttagtattttgggaggtcgaggcgggtggattataaggttaggagattaagattattttggttaatatggtgaaatttcgtttttattaaaaatataaaaattagttaggcgtggtggtaggtatcggtatttttagttatttaggaggttgaggtaggaaaatcgtttgaatcgggaggtggaggttgtagtgagttgagattatattattgtattttagtttgggttatagagtaagattgttttaaaaaaaaaaaaaaaagtgtttataaattgttcgatgttaagtaaagttttggatttttagcgttaggagaatatttcgagaatttggattttatgtgaagtgaggaattaggaaggagtaggtttgtggtatgtatgagaaatttcggggtatgggtagtagttttgttttttgtttggatatgtggagtatgtgtttggagaaaatgttggcggggaatttagagaggtgggtaggagtgggttattacggaggggaggaggaggtgtcggtgtaaacggtggtttttttatgggatatttattatggtgattaaagggagggttatgtgaggaggagggattggtaggtgtatttggcgggatgttaaatttttatttgtattatcgatattatttgcgattttatttgaggggtgtcggtagaggaagtttattttttttttttttcgttttacgggatatatttatgtttagtaaggaggaggaatgtcgggaagaggttttttttaggatttatttaggtaagtgggtgattttattgagtgttttattagagaaggagatataattttaagtgagttagtgggaaatggagggagttttttggatgggtaatttcgatggggtaaaaaggtgttttttatttttgattttaatatttagattaaagatggatttggagattgggttattggataagtattttagtttttttttttaaatcgtgatagtattaaacgttttgagatgatggtaattagagtgattttttttttttttttttttgattagtcgagttttagcgtaggtttttttttttttgataggtaagttagtataatttttattttataggtgagttagtgttgtttttcgttttatataggtgatttagtgtagtttttagtttttatataggtgagttagtatagtttttttttttatatataggtgagttagtgtagttttttttatttatataggtgagttgtatagttttttatttttatatataggtgagttagtgtagtttttttttatatatataggtgagttagtgtagttttttttatttatataggtgagttgtatagttttttatttttatatataggtgagttattgtagtttttttttatatatataggtgagttagtgtagtttttttttatatatataggtgagttggtattgttttttttttatataggtgagttagtatagtttttttttatatatataggtgagttagtgtagtttttttttatatatataggtgagttagtgtagtttttttttatatatataggtgagttagtgt

SEQ ID NO: 76 - DNA, 2501 bp, Artificial Sequence
  chemically treated genomic DNA (Homo sapiens)
gtatttgttttttattgtttttataataaattattataaatttggtgatataaaataatataaatttattgtttaaagttttgtaggttataggtttgataagtgttttattgggttaaaattaagttgttagtagggttgtgttttttttgggggttttatggaagaatttgtttttatgttttttttagtttttagaagtttttagatttttaggtttttgggtttttttttttatttttaaagttagtaagggtagattgaggtttttttaagttatattattttgattttttttgtttttattttttatttttttttttttttttttgagaacgagtttttttttgttgtttaggttggagtgtagtggcgtggtattagtttattgtaattttcgtttttcgggttttagtaatttttatgtttaagtttttagagtagttgggattataggtatttattattacgttagattaattttttgtattttagtagcgatagggttttattttgttggttaggttggttttgaatttttgattttaggtgatttatttattttggttttttaaagtgttggaattaaggtttgagttatcgtgtttagtttattttttatttttaaggattttatgataatattgggtttatttaattaatttaggataatatttttaatttaatgttagttgataagtaattttaattttatttgtaattttaatttttttttgttatgtaatttaatttatttagtttttaggaattgggaagtggatattattggtagggggtattattttgtttgttataggtatatttgtttataagtttaaatcgagagtttgtatataggaggtaggaggtgtgataataattggataaaggtttttttggaatgataaaattttttttaaatatagggaggttttgcgatatgatatttggtaaattatttgagttttagtatttaaattttcgttaaaatggaaattattattttttgtttggtatgttaaatgaaatatttatgtaaacggatttagattagaggtttataaataggatttaagtttttgatgaattttgatgaggagggtgggcgaagtattttaaatgaaaatgagatagattgcgagattttcggagaggagtgagtgataagcgtttattcgtgtatgaagttggaggtagaaaattttagtaaaaggaatttttaagttttattgaagtttttgaattaaggtttgaaagtttagggttaaaaaaaaggtagtgaagaagtttattaagataatttttcgttaggtagtagatagtatttgaaatgtagtgggaaatttgtgaggtttttataggtaaggattaaattttatatttttattttaagatgtgttatagttgtttaattatttagtgattaaaaaagtgaattaaagatgttgttaagattaaaaaaataaaaattaatgtaggttttatcgagatttgaattcggatcgttggatttagagtttagagtgttaattattatattatggaatcgttacgtatgtgtagttgttttcggttgtttaatttttagagaatttcgtttttatttataaatttattatttataggcggtttcgtttggttttagcgagtcgttttcggtacggtagttcgagaaatgagtaagcggttattaagattatggtagttaggagttttaggatttagttttttttttgagttttttttagcgattaaagtttgaagttttacgtatttcgattttcgcgtatatcgtttttgttgggtttaggggcggggcgtcgttttcggaagtatttttttttaaaggttggggtttgtcggaaatggcgtagcggtagggaggggttttttatttagttcggtagttgaagttcggcgttcgggttatttttgtagcgacgttttttggttttatagatattattgttgttttcgttttttcgtttttcggtcgcgtaatgggtattcgcgacgacgagtacgattatttttttaaaggtgaggttatgggttttcgtattttatatagttttcgttcggggattcgggttattttcggtggattttcgtgtcggttatttttgtattgatataggttttttttagttttttttttttgtgcggtttcgttttttatttagtttagttttttttttttcgtttagataggggtttttattatatgtcgttttttgagcgatttttttataggttttcgttggttttagagtttttttttgcgtgttttttttttggcggattgtttttttttatatcgtcgaattttttttttcgggttttacggtttcgtcgttttttttattattttttttttcgggtgtagcgttttttttttttcggcgtatattttttttagttcgcgttttttttcgaagtttttttgacgggtttttcgttttttttttggttttgttttcggtgtagatttttattatagg

SEQ ID NO: 77 - DNA, 2501 bp, Artificial Sequence
  chemically treated genomic DNA (Homo sapiens)
tttgtaatgggagtttgtatcgaaggtaaggttaagagggaagcgaagaattcgttagaggggtttcgggagaggacgcgagttgggaagggtgtacgtcgagggggagggggcgttatattcgaaaagagagatggtgggaggagcggcggggtcgtagaattcggggaaaggaattcgacgatgtgggagaaggtagttcgttaggggaaggatacgtagggaggggttttgaggttagcgaaggtttatggagaggtcgtttagagagcggtatgtgatggggatttttgtttgagcgggggagaagaggttgagttgggtaggagacggaatcgtataaaaaggaagggttgagggaggtttatattagtgtaggggtggtcggtacgagggtttatcgggagtggttcgggttttcgaacgaggattgtgtagagtgcgagagtttatggttttatttttaaagaggtagtcgtattcgtcgtcgcgggtgtttattgcgcggtcgaggagcgaaagggcgggagtagtagtggtatttgtgggattagggggcgtcgttgtaggggtaattcgagcgtcgagttttaattgtcggattgggtgaagagtttttttttgtcgttgcgttattttcggtaggttttagtttttaaggggaagtattttcgggggcggcgtttcgtttttgagtttaataagggcggtgtgcgcgagagtcgagatgcgtggggttttaagttttagtcgttaaaggaggtttaaaggggaaattgagttttggaatttttagttattatagttttagtggtcgtttgtttatttttcgagttatcgtgtcggaagcggttcgttggaattaggcgggatcgtttgtgagtggtgggtttgtggatgggggcggggttttttgaggattagatagtcgaaggtagttatatatgcgtggcggttttatggtgtaatggttagtattttggattttgaatttagcgattcgagtttaaatttcggtggaatttgtattggtttttgtttttttaattttgataatatttttaatttatttttttggttattaagtaattgaataattatgatatattttaagatggagatgtaaaatttaatttttgtttatgaagattttataaattttttattgtattttaggtgttatttgttatttggcggggggttgttttaatgagtttttttattgttttttttttaattttgggtttttaagttttgatttaaaagttttagtgaaatttgaaaattttttttgttggaattttttatttttagttttatgtacgggtaggcgtttgttatttattttttttcggaaatttcgtaatttattttatttttatttagagtatttcgtttattttttttattaagatttattaagaatttgagttttatttgtaggtttttaatttaagttcgtttatataagtattttatttaatatgttaagtaaaggatggtaatttttattttagcggaagtttggatattaagatttaagtgatttgttagatattatgtcgtagggtttttttgtatttgaagagaattttgttattttagaaaagtttttatttaattattgttatattttttattttttatatgtaaattttcgatttagatttgtgggtaagtatgtttataataagtagaataatgttttttgttaatgatgtttattttttaatttttggagattgaataggttaggttatatggtaaaggggaattgaggttatagatgaaattaaggttgtttattagttgatattaaattagggatattattttggattagttgggtgggtttagtgttgttataaggtttttaaaagtagaaaatgggttgggtacggtggtttaggttttaattttagtattttgggaggttaaggtgggtggattatttgaggttaagagtttaagattagtttggttaataaggtgaaattttgtcgttattaaaatataaaaaattagtttggcgtggtggtgggtgtttgtagttttagttattttggaggtttaggtatgagaattgttggaattcgggaagcggaggttgtagtgagttgatattacgttattgtattttagtttgggtaatagagagagattcgtttttaaaaaaaaaaaaaaaaaagtggaaaatggaggtagaagaggttagagtgatgtgatttgaaaagattttaatttgtttttgttggttttgaagatggaggaaagggtttaggagtttaggaatttggaggtttttagaagttgggaaaggtatggaaatagatttttttataaggtttttagaaggaatatagttttgttgataatttgattttagtttaatgagatatttgttagatttgtgatttatagaattttaagtaataaatttgtgttgttttatgttattaagtttgtggtaatttgttatagaagtaatagaaaataaatat

SEQ ID NO: 78 - DNA, 2401 bp, Artificial Sequence
  chemically treated genomic DNA (Homo sapiens)
ttgtttttaaatatatgatgttagttttttgtatagataattttttgtttttatagtttgaaatatatttgatttaaattacgatttgatatttttagagagagagaagtagataaaagtttttattttaggttggtagtagggattttgtagaagtggttgaaatgaaatttggtttatagagaataagttttatagttattttgtttttgtttattttttttagatttaaaggtagattgggttatttcggaatttatgttttttttaggatatagtaataatatatttttaaggaatagttttattatttgtaaaatttgtagagtataaaatataattgttttattgataggaggttggatttggatttaatattgtattattttgtttttatattatggtttgataaatagaatgtgattttaattttgattttaaagtgagatttttttagattatttatgtttttttattttttttgtttttttagttttttttttttttttatttttattaagaagtggaatttgaatttgttattttttaaggtttgtgtagtgtttgtgatttagaggataggattgtgaaagtgtttttaatatattataatgtatattttttgttttttttttttttttataatttgattttttttgtttttatttgttttcgagttgtaaggtgtagattaaaggttttgttatagtagaaggaaattagagggagatgtttcgtttttagaggaaagaagttgagttttttaagtaaaatttaagtagagagtgtatatttttgtttgaaagtttggagaagtagtagaatttttaggatatttgaaagtacgttttggtaaagtttcggatgaaagtgttttttaattattaatggtttattagtatggtttggtttgtgattttagaatttagattattttataattttatatagttatagtaagtagttttgaatttttgttgtttggtttgagagtgtattttatttatcgatcggatggttttggggtggttatggttttaaggtaaggaggtatttagtagaggatttttgaggtttggtatgtttgtagattgagttatagagaatattttgaggtgtcgtaagtgtttagagagtcgaagtgtgtagggtttaaagtaaggttttttttggatgtgttcgggagtttcggggattttaagcgtgggttttagtttttattttggtggttggtttgtaaatgatttttttgttattattttttttgatattagaatagaaagaatatataatttttgttagagaggagagcgagcgagttagagagtagtttgatttaggtatggaatgaggtcgtttttaaaagttggatttttttttttgggatttttttttaattttgttggttttgggagggagtgttattaaataaagttttaataaaaatagaatttgttcgttttttaattgtttttttttatatttaatagtagtagatttatattttgaaagaggtttcgttgttatttttttttttaaatttttgattttataatagggtttttagaaatttttttattttttatattttttttaaataaattaggttttaggaaaagttaaatgttataataaaaatatggataaagggtatgaagagttaatgtgagtgagagattaggtttttttttatttttttttttgaatttatagattaaaaagtatatgtaaagattttgataagaagatagtttggttgtttaattttaggtataagttttaagttaagagattcgtttaaggttatgtaatagtagtaagtaaggtatatacgtttttaaatttgagtatagtgatttttgaattttttgaacgattagggttatatgtgcgttttatgtaaaggaggttagggtacgggtgttttggggacggtttttttagggtaagtggtggtttaggtgattgcggttttttatgttataaagttgtttttttaggtagattaattattatggatatatagttgtttatttttattttggatttaaattagtttattttttttttttgaaaagttaaatggatattattattataatatagatgttaagaatgttagttagggttagtgagaggatgatgtttggtgaagaggtagagggtatatattatatttttttttttttttttattttagtttatggttttcgggtgtgaaattatggtttagttgtataattatttatagaaaggaataatttttttatttttgtttttagattttggtttttggtttagtgggattggttggagtattttgaggtggtcgtttgtaaattttagtggttttttagtagatgtttttaaatttatataagggttatttgaagagtttgtt

SEQ ID NO: 79 - DNA, 2401 bp, Artificial Sequence
  chemically treated genomic DNA (Homo sapiens)
aataagttttttagatgatttttgtgtaagtttgagagtatttgttggaaaattattagaatttgtaaacggttattttaaaatattttagttagttttattaagttaaagattagaatttgagaatagggatggggaaattatttttttttgtggatgattatgtagttgggttatgattttatattcgggggttatgggttaagatggaggggaaggaaggaatgtaatgtgtgttttttatttttttattaggtattatttttttattggttttggttggtatttttggtatttgtattgtggtggtggtgtttatttggttttttagaaggaagaggtgagttggtttgggtttaaaatgggaatggatagttatgtgtttatgatgattagtttgtttgggaaggtagttttgtggtatgaagagtcgtagttatttggattattatttattttaggagggtcgtttttaaagtattcgtgttttggttttttttgtatgagacgtatatgtgattttggtcgtttaaagggtttaggggttattgtgtttagatttggaagcgtgtgtgttttgtttgttgttattgtatggttttggacgagttttttgatttggggtttgtgtttgaagttaagtagttaggttgtttttttattaagatttttatatatgttttttggtttatgaatttaaaaagaaagatgaaggaaaatttgattttttatttatattaattttttatgttttttgtttatgtttttattgtgatatttggttttttttaaaatttaatttatttggggggggtatgaaaaataaaaaggtttttgggaattttgttatggaattagaggtttgaagaggggggtgataacgagattttttttaaaatataggtttattattgttaggtgtgaaagagaatagttggaaaacgaataagttttgtttttgttaaagttttatttggtgatatttttttttaagattaatagaattggggaaaggttttaaagagaggaatttaatttttaaaaacggttttattttatatttgagttaggttgttttttggttcgttcgtttttttttttaataagagttatgtgttttttttgttttagtattaaaaaaggtgataataagggagttatttataagttagttattaagatggagattgaggtttacgtttgaggttttcggagttttcgggtatatttaggaaggattttgttttggattttatatatttcggttttttggatatttgcgatattttaaggtgttttttgtagtttaatttgtaaatatgttaggttttagggattttttgttgggtgtttttttgttttgggattatggttattttagagttattcgatcgatggatgggatgtatttttagattaagtagtaggaatttaaagttgtttgttgtaattgtgtgagattgtgaagtggtttgaattttggaattataaattaagttatgttggtgggttattaatggttggaaaatatttttattcggggttttgttagagcgtgtttttaagtgttttggaaattttgttgtttttttaagtttttagataagaatgtgtattttttgtttaggttttgtttgggaaatttaattttttttttttggagacggggtatttttttttgatttttttttgttatgataaaatttttaatttgtattttataattcggggataaatggggataggaaggattaagttgtagagagaaaaagaaaataagagatatatattgtgatatattagggatatttttatagttttgttttttggattatagatattgtatagattttagggaatggtaggtttaagttttattttttggtggggatgagaagggagagagagttagagggataaagagaatgagaagatatggatgatttgggagagttttattttggaattagaattggaattatattttgtttattaagttataatgtaaggatagaataatataatattaagtttaaatttaattttttgttagtggagtagttatgttttatattttatagattttataaataatgaggttgttttttgaaaatgtgttgttgttgtgttttggaggagatatgagtttcgagatgatttaatttgtttttgaatttggaggaaataggtagaaataaaatgattgtagaatttattttttgtaggttaaattttattttagttatttttgtaggatttttattgttaatttggaatggagatttttatttatttttttttttttgaagatgttaaatcgtggtttagattaaatatattttaagttataaaagtaggaggttatttgtgtagggggttggtattatgtatttaggggtaa

SEQ ID NO: 80 - DNA, 3001 bp, Artificial Sequence
  chemically treated genomic DNA (Homo sapiens)
gaaagattgtcgggcgtagtggtttacgtttgtaattttagtatttttagaggttgaggtgagtagaatatttgatgttaggagtttaagattagtttggttaatatggtgaaattttattttatttttattaaaaatataaaaattagttgggcgtggtggcgggcgtttgtaattttagttatttaggaggttgaggttggagaattatttgattttggaggcggaggttgtagtgagtcgagattatattattatattttagtttggataatagagtgagatttcgttttaaaaataataataataaaatttaaaatatttgtttaaagtttaagatatgtatatttgtgaaagttgattatataaattgggttatttttgaaatatttaattaaattagagttgaagggttagggggaagaagtattcggggtatatagtatttgttttaagaattaaattttttataagtttaattgttgaattagttttttgtatttttaagattagttttatttaatagttgttaaaatgaattgttatgattttaagattggttttatttattattatcgtttattaattagagtttgttagtttttataagttttagtgtgaatgagtttttttttaaaatagtatgtaatattgtttttttttataaaattcggaatttttttttttttttttttgagatggaattttgtttttgttgtttaggttggagtgtaatggcgcgatttcggtttattgtaatttttatttttcgggtttaagtattttttttgtgttagttttttgagtagttgggatttaggtatgcgttattatgtttaattaattttgtatttttagtagagacggagtttttttatgttggttaggttggttttaaatttttgattttaggtgatttgttcgtttcggttttttaaagtgttgggattataggtatgagttattatatttggtcgtaattttttttttatttttttgattatattaatgattagttcggtttgtgtgtatgttatgaattgtagtttttgtttattaaataaaatgtttttagagatttgtttttatattatatttggttttgatataattatttttaaggaattttatttttaaaaatttatttttatagaaatgaaagtattaataaatgggaataagtacgataatttatatcgtagaattgtttgtagtggtaaaagttgtaatattttaattgtttatgagtaaggaaatgattgaataaattattgtatatttatattaaagttaaatttgtaagtattgaagtataggtacggttattttttttttttttttgtggaaatagggttttattttgttatttaggttggagtgtagcggtattattttgggttattgtaatttttgttttttgagtttaagtgatttttatattttagttttttaagtagttgggattataggtacgtgttattatatttggttaattttggtttttggttttttttttaattggtatgtttatttaaaaatatagattaacgggttgggtatggtgatttatatttataattttagtattttgggaggttaaggcgggtggattatgaggttaggagatcgagattattttggttaaaatagtgaaattttatttttattaaaagtataaaaaattagtcgggtgtggtggtgggtatttgtagttttagttattcgggaggttgaggtaggagaatggcgtgaatttgggaagtagagtttgtagtgagtcgagattgtgttattgtattttagtttgggcgatagagtaagattttattttaaaaataaataaataaataaataaaataataaaataaaatatagattaatgattttgtgttttaatgttattgtggttatgtgttgatgtttataaaatataagttataagggattttttataaatatattttagatagaagggtaaatagaaatgattgataagatagtgttattttagatatattttttttaattattaatatttgttagaaaatggagtttgatattatttataattatattaatatttatagaggttaattgttataggtattaagggtatattagggttaggagattttattttagattttttaaatatttttatattttagttattaagattagttattagagtttaatttgtttttaataagtagaatttttatgtttatttaaagagttttttatatttttttgggtttatttatttgtagagaatagtagaaattgtaattaggttttttatattatgtatttatatgtgatgtttaatttttatatgttgtttaatttttttaagataaatggagtgattcgtagtagggttacgtagatgagaaagttttgtatggagattatattttcgtgtatttttcgttttattttcgtgaggtttagttttcgggtaaggtttttaattcggaagattagttgtttcgttttgttttttttaatggtttttttatattcggaattcggtttattttttcgttttagttaatttttgtatttttagtagaaatggggtttcgttatgttgtttaggttggttttgaatttttgggtataagggatttattcgttttggttttttaaagtgtttagattataggtatgagttattacgtttggtttaatatggttattattttttaaagtgttaaattatggtcgggggttgtgatttacgtttgtaattttagtattttgggaggtcgaggcgggtgaattacgaggttaggagatggagattagtttggttaatatggtgaaattttatttttattaagaatataaaaaattagttgggcgtggtggtaggcgtttgtaattttatttatttaggaagttgaggttggagaatcgtttgaattcgggaggcggaggttgtagtgagtagagattacgttattgtagtttagtttgggtaatagtgcgagatttt

SEQ ID NO: 81 - DNA, 3001 bp, Artificial Sequence
  chemically treated genomic DNA (Homo sapiens)
agagtttcgtattgttgtttaggttggattgtagtggcgtgatttttgtttattgtaattttcgtttttcgggtttaagcgattttttagttttagttttttgagtagatgggattataggcgtttgttattacgtttagttaattttttgtatttttagtagagatggggttttattatgttggttaggttggtttttattttttgatttcgtgatttattcgtttcggttttttaaagtgttgggattataggcgtgagttatagttttcggttataatttagtattttaaaaaataatagttatgttgggttaggcgtggtggtttatgtttgtaatttgagtattttgggagattaaggcgggtagattttttgtgtttaggagtttaagattagtttgggtaatatggcgaaattttatttttattaaaaatataaaaattagttggggcgaggggataggtcgagtttcgggtgtaagggggttattagggagagtagagcgaggtagttgatttttcggattgggggttttgttcggaagttggattttacggagatgaaacggaagatgtacgaggatatgatttttatatagaatttttttatttacgtggttttgttgcgagttattttatttattttaaagaaattggatagtatatgaagattggatattatatgtgaatgtatgatatgaagagtttggttatagtttttattgttttttgtaagtaaataggtttagaaaggtataagagattttttgaatggatataaaaattttgtttgttaagaataagttgagttttggtaattgattttaatagttaaaatataaaaatatttgggaagtttgaaatgaggttttttggttttggtgtgtttttaatgtttgtgatagttggtttttgtgaatattggtataattgtaaataatgttaaattttattttttagtaagtattaataattaagggaagtatgtttgaaatggtattgttttgttagttatttttgtttatttttttgtttggagtgtatttgtgaagagttttttataatttatgttttatggatattagtatataattataatgatattgaagtataggattattagtttatattttattttattattttatttatttatttatttatttttgagatggagttttgttttgtcgtttaggttggagtgtagtggtataatttcggtttattgtaagttttgttttttaggtttacgttatttttttgttttagtttttcgagtagttgggattataggtgtttattattatattcggttaattttttgtatttttagtagagatggggttttattgttttagttaggatggtttcgattttttgattttatgatttattcgttttggttttttaaagtgttgggattataggtgtaagttattatgtttagttcgttagtttatatttttaagtaaatatattaattaagaaagaagttaaaaattaaaattagttaggtgtggtggtacgtgtttgtagttttagttatttgggaggttgaggtgtgaggattatttgaatttaggaggtagaggttgtagtgatttaagatggtgtcgttgtattttagtttgggtgatagagtgagattttgtttttataaaaagaaaaaaaaaatagtcgtgtttgtattttagtatttataaatttaattttagtatagatgtatagtaatttatttaattatttttttatttatagataattaggatgttgtaatttttgttattataaataattttgcgatgtggattatcgtatttatttttatttattggtgtttttatttttataagaatggatttttaaagatagaattttttgggaatagttatgttaaagttaaatataatatagagataaatttttaaaaatattttatttggtaagtaagagttgtaatttatggtatatatatagatcgggttgattattggtatgattaggagaataaagggaaggttgcggttaggtgtgatagtttatgtttgtaattttagtattttgggaggtcgaggcgggtagattatttgaggttaggagtttgagattagtttgattaatatggagaaatttcgtttttattaaaaatataaaattagttgggtatagtggcgtatgtttgaattttagttatttaggaggttgatataggagaaatgtttgaattcgggaggtgaaggttgtagtgagtcgagatcgcgttattgtattttagtttgggtaataagagtaaaattttattttaaaaaaaaaaaagagaaggtttcgggttttatgagaaagaatagtattatatattgttttggaagaaagtttatttatattagagtttgtgggagttagtaagttttgattggtgagcgatggtggtaggtaaaattagttttagagttatggtagtttattttagtagttattaggtaaaattggttttagggatatagaaggttggtttagtagttggatttgtggaaaatttaatttttgaagtagatgttgtgtgtttcgaatgttttttttttttggttttttaattttgatttagttgagtattttaagaatgatttaatttatgtaattaatttttataggtatatatgttttaaattttaaatagatgttttgggttttgttgttgttgtttttgagacggagttttattttgttgtttaagttggagtgtagtggtgtgatttcggtttattgtaattttcgtttttagggttaagtgattttttagttttagttttttgaatagttgggattataggcgttcgttattacgtttagttaatttttgtatttttagtagagatggggtggggttttattatgttggttaggttggttttgaatttttgatattaagtgttttgtttattttagtttttgaaagtgttgggattataggcgtgagttattgcgttcggtagtttttt

SEQ ID NO: 82 - DNA, 3001 bp, Artificial Sequence
  chemically treated genomic DNA (Homo sapiens)
gtattagtttatttgtgtgtgtgggggagggttgtattagtttatttgtgtgtgtgggggagggttgtattagtttatttgtgtgtgtgggggagggttgtattagtttatttgtgtggggggagggtagtattagtttatttgtgtgtgtgggggagggttgtattagtttatttgtgtgtgtgggggagggttgtagtagtttatttgtgtgtgggggtggagggttgtatagtttatttgtgtgagtggggagggttgtattagtttatttgtgtgtgtgggggagggttgtattagtttatttgtgtgtgggggtggagggttgtatagtttatttgtgtgagtggggagggttgtattagtttatttgtgtgtgggggggagggttgtattagtttatttgtgtgggggttgagggttgtattaggttatttgtatagggtggagggtagtattggtttatttgtggaatgaaggttgtattagtttatttgttaggggagaggaggtttgtgttgagatttggttgattagaaaggggagaaaagagggttattttgattgttattattttaaaatgtttaatattgttatgatttgaaaggaagagttaaggtatttgtttagtagtttaatttttaagtttatttttgatttgaatgttgagattaaggatgagaaatatttttttgttttattgggattgtttatttagggaattttttttattttttattgatttatttaaggttgtatttttttttttgatgaaatatttaatggggttatttatttgtttgaataggttttgaggaaagtttttttttggtattttttttttttattgagtataagtgtgttttgtagggtgaaggggaaagaaagtggattttttttgttgatattttttaaatgaagttgtaagtgatattggtggtgtagatgagggtttggtattttgttagatgtatttgttagttttttttttttatatggttttttttttgattattatgatgggtgttttatgagggagttattgtttgtattgatattttttttttttttttgtggtggtttatttttgtttatttttttgggttttttgttagtattttttttaggtatatgttttatatgtttaggtagaaggtagggttgttgtttatgttttggagttttttatgtatgttataggtttgtttttttttgattttttattttatatggaatttagatttttggaatgtttttttgatgttgaaggtttaggattttgtttggtattgggtagtttataggtatttttttttttttttttgagatagttttattttgtggtttaggttggagtgtagtggtgtgattttagtttattgtaatttttattttttggtttaagtgatttttttgttttagttttttaagtagttgggaatattggtgtttgttattatgtttggttaatttttgtatttttagtagagatggggttttattatgttggttaggatggttttgattttttgattttgtgatttatttgttttggttttttaaagtgttgggattttaggtgtgagtgattgtgtttagtttagtgagaattatttaaagattttttgattatagaatatatagtattaagggtgaattttggttttaattgtggattttggtgatggtgatgtgggtagatttagtgattgtaattagtatataggttggttttaatttgtatattttggtgtaggatgttgatggtgggggattttaggggtgggagagataggggtatattggaaatttttggattttatatttgattttgttgtgtattaaaaattgttttaaaaattagtttatttttttaaaaaagttttattgaatgttttgaatgaattgtttttagagttggaaggatttttaatagatgatattttaatatatgttgtagttggtaatgtttaggtaatttttttttgttttgtgttttattgttgtagggtgtgaagaagtttgatgtgttgtgtggaggaagagattgtagtgggggttgttagtgttattttgagaaaggtggatgtgtaagttatagtattgtaataaataatattattttttttatatagttatgttttgtttaataatggggtattttttgggatatgtgtggttgggtagttttattattgtttgaatatattggagagtatttatataaatttagatggttgggtttattatatatttggttgtgtgataaagtttgttgttattaggttataaatttgtatgtaggtagttgtgatatagtattatttgtatatttaaatatagaaaaggtatagtaaaaagaaagtaaaaagatgtaaaatgggatttttgtgtagggtatttattatgaatggagtttgtgggatttggaagttgttttgtttgtgttggggagtgtggggtgtgtggatgtgaaggtttggggtgtgattgtgtattattgtagatttattaatattgggttttaggtggttttaaatttatgtttttaatatttttttttttttagtaataaattaattttagtttattataatttttttattttataaattgttaaattttttaaattttttgattgtttttgtaataatatttagtttaaaatatatattgtatagttgtataaatatattttttttttttatgtttttatttgatgtttttttttattaaaaaaatttttttttattttttaaatttttttgttaaaaataaagaaataaatagatatgggagtttgggtttatatgggtttaggataattaatattattgttttttatttttatattttgttttattagaaggtttttggggtaataatatgtatggagttgttattttttttgggaataatgtttgtttttggattttttttgaagtatttgtttgaggttattttatagttaatatatgtatatatataaataggagtatat

SEQ ID NO: 83 - DNA, 3001 bp, Artificial Sequence
  chemically treated genomic DNA (Homo sapiens)
gtgtatttttatttatatgtgtatatatgttaattgtaaaatagttttaggtaggtgttttaggaagaatttagaagtaggtattgtttttagaggggatgatggttttatgtgtgttattgttttgaagattttttggtgggataagatgtggaggtgaaagatagtgatattgattattttgagtttgtgtaggtttaggtttttatgtttgtttgtttttttgtttttaataaaaaagtttaaaaagtaaaaaaaaatttttttaatagaaaaaaatattgaataaaaatgtagaaaaagaaaatatgtttgtatagttgtataatgtgtgttttaagttaagtgttattgtaaaaatagttaaaaagtttaaaaagtttaatagtttataaagtaaaaaagttatagtaaattaaggttaatttattattgaagaaagaaaaatattgaaaatgtaagtttagggttgtttaagatttagtgttgatggatttatagtggtgtgtggttatgttttaggtttttatatttatgtattttgtattttttaatgtagatagagtaatttttaagttttgtaagttttgtttatggtaaatgttttatataggagttttattttatatttttttattttttttttattgtattttttttgtatttagatatataaatagtattgtgttgtaattgtttatgtataggtttgtagtttagtagtaataggttttattatatagttgggtgtgtagtaggtttggttatttaggtttgtgtgagtattttttagtatgtttaagtaatgatgaaattgtttagttatatgtgttttagaaggtattttgttgttaagtgaggtatgattgtatgaggaagataatattatttattgtaatgttgtgatttatatgtttattttttttagggtagtattggtagtttttattgtaatttttttttttatatggtatattaaatttttttatattttgtaataataaaatataaggtaaagaaaagttatttaaatattgttaattataatatgtattaaaatattatttgttgagaatttttttaattttagaaatgatttatttaaaatatttaataaggtttttttaaaaaaatagattaatttttagagtagtttttggtgtatagtaaaattgagtgtaaggtttagagatttttaatatatttttgttttttttatttttgaaattttttattattgatattttgtattaggatgtataggttggaattaatttgtatgttggttataattgttgagtttgtttgtattattattattagagtttatagttgagattagggtttatttttggtgttgtatgttttatggttaaggagtttttaaatagtttttattaggttgggtgtggttgtttatgtttggaattttagtattttgggaggttgaggtgggtggattataaggttaggagattaagattattttggttaatatggtgaaattttgtttttattaaaaatataaaaattagttaggtgtggtggtaggtattggtatttttagttatttaggaggttgaggtaggaaaattgtttgaattgggaggtggaggttgtagtgagttgagattatattattgtattttagtttgggttatagagtaagattgttttaaaaaaaaaaaaaaaagtgtttataaattgtttgatgttaagtaaagttttggatttttagtgttaggagaatattttgagaatttggattttatgtgaagtgaggaattaggaaggagtaggtttgtggtatgtatgagaaattttggggtatgggtagtagttttgttttttgtttggatatgtggagtatgtgtttggagaaaatgttggtggggaatttagagaggtgggtaggagtgggttattatggaggggaggaggaggtgttggtgtaaatggtggtttttttatgggatatttattatggtgattaaagggagggttatgtgaggaggagggattggtaggtgtatttggtgggatgttaaatttttatttgtattattgatattatttgtgattttatttgaggggtgttggtagaggaagtttatttttttttttttttgttttatgggatatatttatgtttagtaaggaggaggaatgttgggaagaggttttttttaggatttatttaggtaagtgggtgattttattgagtgttttattagagaaggagatataattttaagtgagttagtgggaaatggagggagttttttggatgggtaattttgatggggtaaaaaggtgttttttatttttgattttaatatttagattaaagatggatttggagattgggttattggataagtattttagtttttttttttaaattgtgatagtattaaatgttttgagatgatggtaattagagtgattttttttttttttttttttgattagttgagttttagtgtaggtttttttttttttgataggtaagttagtataatttttattttataggtgagttagtgttgttttttgttttatataggtgatttagtgtagtttttagtttttatataggtgagttagtatagtttttttttttatatataggtgagttagtgtagttttttttatttatataggtgagttgtatagttttttatttttatatataggtgagttagtgtagtttttttttatatatataggtgagttagtgtagttttttttatttatataggtgagttgtatagttttttatttttatatataggtgagttattgtagtttttttttatatatataggtgagttagtgtagtttttttttatatatataggtgagttggtattgttttttttttatataggtgagttagtatagtttttttttatatatataggtgagttagtgtagtttttttttatatatataggtgagttagtgtagtttttttttatatatataggtgagttagtgt

SEQ ID NO: 84 - DNA, 2501 bp, Artificial Sequence
  chemically treated genomic DNA (Homo sapiens)
gtatttgttttttattgtttttataataaattattataaatttggtgatataaaataatataaatttattgtttaaagttttgtaggttataggtttgataagtgttttattgggttaaaattaagttgttagtagggttgtgttttttttgggggttttatggaagaatttgtttttatgttttttttagtttttagaagtttttagatttttaggtttttgggtttttttttttatttttaaagttagtaagggtagattgaggtttttttaagttatattattttgattttttttgtttttattttttatttttttttttttttttttgagaatgagtttttttttgttgtttaggttggagtgtagtggtgtggtattagtttattgtaatttttgttttttgggttttagtaatttttatgtttaagtttttagagtagttgggattataggtatttattattatgttagattaattttttgtattttagtagtgatagggttttattttgttggttaggttggttttgaatttttgattttaggtgatttatttattttggttttttaaagtgttggaattaaggtttgagttattgtgtttagtttattttttatttttaaggattttatgataatattgggtttatttaattaatttaggataatatttttaatttaatgttagttgataagtaattttaattttatttgtaattttaatttttttttgttatgtaatttaatttatttagtttttaggaattgggaagtggatattattggtagggggtattattttgtttgttataggtatatttgtttataagtttaaattgagagtttgtatataggaggtaggaggtgtgataataattggataaaggtttttttggaatgataaaattttttttaaatatagggaggttttgtgatatgatatttggtaaattatttgagttttagtatttaaatttttgttaaaatggaaattattattttttgtttggtatgttaaatgaaatatttatgtaaatggatttagattagaggtttataaataggatttaagtttttgatgaattttgatgaggagggtgggtgaagtattttaaatgaaaatgagatagattgtgagatttttggagaggagtgagtgataagtgtttatttgtgtatgaagttggaggtagaaaattttagtaaaaggaatttttaagttttattgaagtttttgaattaaggtttgaaagtttagggttaaaaaaaaggtagtgaagaagtttattaagataattttttgttaggtagtagatagtatttgaaatgtagtgggaaatttgtgaggtttttataggtaaggattaaattttatatttttattttaagatgtgttatagttgtttaattatttagtgattaaaaaagtgaattaaagatgttgttaagattaaaaaaataaaaattaatgtaggttttattgagatttgaatttggattgttggatttagagtttagagtgttaattattatattatggaattgttatgtatgtgtagttgtttttggttgtttaatttttagagaattttgtttttatttataaatttattatttataggtggttttgtttggttttagtgagttgtttttggtatggtagtttgagaaatgagtaagtggttattaagattatggtagttaggagttttaggatttagttttttttttgagttttttttagtgattaaagtttgaagttttatgtattttgatttttgtgtatattgtttttgttgggtttaggggtggggtgttgtttttggaagtatttttttttaaaggttggggtttgttggaaatggtgtagtggtagggaggggttttttatttagtttggtagttgaagtttggtgtttgggttatttttgtagtgatgttttttggttttatagatattattgttgtttttgtttttttgttttttggttgtgtaatgggtatttgtgatgatgagtatgattatttttttaaaggtgaggttatgggtttttgtattttatatagtttttgtttggggatttgggttatttttggtggatttttgtgttggttatttttgtattgatataggttttttttagttttttttttttgtgtggttttgttttttatttagtttagtttttttttttttgtttagataggggtttttattatatgttgttttttgagtgatttttttataggtttttgttggttttagagtttttttttgtgtgttttttttttggtggattgtttttttttatattgttgaatttttttttttgggttttatggttttgttgttttttttattatttttttttttgggtgtagtgtttttttttttttggtgtatattttttttagtttgtgtttttttttgaagtttttttgatgggttttttgttttttttttggttttgtttttggtgtagatttttattatagg

SEQ ID NO: 85 - DNA, 2501 bp, Artificial Sequence
  chemically treated genomic DNA (Homo sapiens)
tttgtaatgggagtttgtattgaaggtaaggttaagagggaagtgaagaatttgttagaggggttttgggagaggatgtgagttgggaagggtgtatgttgagggggagggggtgttatatttgaaaagagagatggtgggaggagtggtggggttgtagaatttggggaaaggaatttgatgatgtgggagaaggtagtttgttaggggaaggatatgtagggaggggttttgaggttagtgaaggtttatggagaggttgtttagagagtggtatgtgatggggatttttgtttgagtgggggagaagaggttgagttgggtaggagatggaattgtataaaaaggaagggttgagggaggtttatattagtgtaggggtggttggtatgagggtttattgggagtggtttgggtttttgaatgaggattgtgtagagtgtgagagtttatggttttatttttaaagaggtagttgtatttgttgttgtgggtgtttattgtgtggttgaggagtgaaagggtgggagtagtagtggtatttgtgggattagggggtgttgttgtaggggtaatttgagtgttgagttttaattgttggattgggtgaagagtttttttttgttgttgtgttatttttggtaggttttagtttttaaggggaagtatttttgggggtggtgttttgtttttgagtttaataagggtggtgtgtgtgagagttgagatgtgtggggttttaagttttagttgttaaaggaggtttaaaggggaaattgagttttggaatttttagttattatagttttagtggttgtttgtttattttttgagttattgtgttggaagtggtttgttggaattaggtgggattgtttgtgagtggtgggtttgtggatgggggtggggttttttgaggattagatagttgaaggtagttatatatgtgtggtggttttatggtgtaatggttagtattttggattttgaatttagtgatttgagtttaaattttggtggaatttgtattggtttttgtttttttaattttgataatatttttaatttatttttttggttattaagtaattgaataattatgatatattttaagatggagatgtaaaatttaatttttgtttatgaagattttataaattttttattgtattttaggtgttatttgttatttggtggggggttgttttaatgagtttttttattgttttttttttaattttgggtttttaagttttgatttaaaagttttagtgaaatttgaaaattttttttgttggaattttttatttttagttttatgtatgggtaggtgtttgttatttatttttttttggaaattttgtaatttattttatttttatttagagtattttgtttattttttttattaagatttattaagaatttgagttttatttgtaggtttttaatttaagtttgtttatataagtattttatttaatatgttaagtaaaggatggtaatttttattttagtggaagtttggatattaagatttaagtgatttgttagatattatgttgtagggtttttttgtatttgaagagaattttgttattttagaaaagtttttatttaattattgttatattttttattttttatatgtaaatttttgatttagatttgtgggtaagtatgtttataataagtagaataatgttttttgttaatgatgtttattttttaatttttggagattgaataggttaggttatatggtaaaggggaattgaggttatagatgaaattaaggttgtttattagttgatattaaattagggatattattttggattagttgggtgggtttagtgttgttataaggtttttaaaagtagaaaatgggttgggtatggtggtttaggttttaattttagtattttgggaggttaaggtgggtggattatttgaggttaagagtttaagattagtttggttaataaggtgaaattttgttgttattaaaatataaaaaattagtttggtgtggtggtgggtgtttgtagttttagttattttggaggtttaggtatgagaattgttggaatttgggaagtggaggttgtagtgagttgatattatgttattgtattttagtttgggtaatagagagagatttgtttttaaaaaaaaaaaaaaaaaagtggaaaatggaggtagaagaggttagagtgatgtgatttgaaaagattttaatttgtttttgttggttttgaagatggaggaaagggtttaggagtttaggaatttggaggtttttagaagttgggaaaggtatggaaatagatttttttataaggtttttagaaggaatatagttttgttgataatttgattttagtttaatgagatatttgttagatttgtgatttatagaattttaagtaataaatttgtgttgttttatgttattaagtttgtggtaatttgttatagaagtaatagaaaataaatat

SEQ ID NO: 86 - DNA, 2401 bp, Artificial Sequence
  chemically treated genomic DNA (Homo sapiens)
ttgtttttaaatatatgatgttagttttttgtatagataattttttgtttttatagtttgaaatatatttgatttaaattatgatttgatatttttagagagagagaagtagataaaagtttttattttaggttggtagtagggattttgtagaagtggttgaaatgaaatttggtttatagagaataagttttatagttattttgtttttgtttattttttttagatttaaaggtagattgggttattttggaatttatgttttttttaggatatagtaataatatatttttaaggaatagttttattatttgtaaaatttgtagagtataaaatataattgttttattgataggaggttggatttggatttaatattgtattattttgtttttatattatggtttgataaatagaatgtgattttaattttgattttaaagtgagatttttttagattatttatgtttttttattttttttgtttttttagttttttttttttttttatttttattaagaagtggaatttgaatttgttattttttaaggtttgtgtagtgtttgtgatttagaggataggattgtgaaagtgtttttaatatattataatgtatattttttgttttttttttttttttataatttgattttttttgtttttatttgtttttgagttgtaaggtgtagattaaaggttttgttatagtagaaggaaattagagggagatgttttgtttttagaggaaagaagttgagttttttaagtaaaatttaagtagagagtgtatatttttgtttgaaagtttggagaagtagtagaatttttaggatatttgaaagtatgttttggtaaagttttggatgaaagtgttttttaattattaatggtttattagtatggtttggtttgtgattttagaatttagattattttataattttatatagttatagtaagtagttttgaatttttgttgtttggtttgagagtgtattttatttattgattggatggttttggggtggttatggttttaaggtaaggaggtatttagtagaggatttttgaggtttggtatgtttgtagattgagttatagagaatattttgaggtgttgtaagtgtttagagagttgaagtgtgtagggtttaaagtaaggttttttttggatgtgtttgggagttttggggattttaagtgtgggttttagtttttattttggtggttggtttgtaaatgatttttttgttattattttttttgatattagaatagaaagaatatataatttttgttagagaggagagtgagtgagttagagagtagtttgatttaggtatggaatgaggttgtttttaaaagttggatttttttttttgggatttttttttaattttgttggttttgggagggagtgttattaaataaagttttaataaaaatagaatttgtttgttttttaattgtttttttttatatttaatagtagtagatttatattttgaaagaggttttgttgttatttttttttttaaatttttgattttataatagggtttttagaaatttttttattttttatattttttttaaataaattaggttttaggaaaagttaaatgttataataaaaatatggataaagggtatgaagagttaatgtgagtgagagattaggtttttttttatttttttttttgaatttatagattaaaaagtatatgtaaagattttgataagaagatagtttggttgtttaattttaggtataagttttaagttaagagatttgtttaaggttatgtaatagtagtaagtaaggtatatatgtttttaaatttgagtatagtgatttttgaattttttgaatgattagggttatatgtgtgttttatgtaaaggaggttagggtatgggtgttttggggatggtttttttagggtaagtggtggtttaggtgattgtggttttttatgttataaagttgtttttttaggtagattaattattatggatatatagttgtttatttttattttggatttaaattagtttattttttttttttgaaaagttaaatggatattattattataatatagatgttaagaatgttagttagggttagtgagaggatgatgtttggtgaagaggtagagggtatatattatatttttttttttttttttattttagtttatggtttttgggtgtgaaattatggtttagttgtataattatttatagaaaggaataatttttttatttttgtttttagattttggtttttggtttagtgggattggttggagtattttgaggtggttgtttgtaaattttagtggttttttagtagatgtttttaaatttatataagggttatttgaagagtttgtt

SEQ ID NO: 87 - DNA, 2401 bp, Artificial Sequence
  chemically treated genomic DNA (Homo sapiens)
aataagttttttagatgatttttgtgtaagtttgagagtatttgttggaaaattattagaatttgtaaatggttattttaaaatattttagttagttttattaagttaaagattagaatttgagaatagggatggggaaattatttttttttgtggatgattatgtagttgggttatgattttatatttgggggttatgggttaagatggaggggaaggaaggaatgtaatgtgtgttttttatttttttattaggtattatttttttattggttttggttggtatttttggtatttgtattgtggtggtggtgtttatttggttttttagaaggaagaggtgagttggtttgggtttaaaatgggaatggatagttatgtgtttatgatgattagtttgtttgggaaggtagttttgtggtatgaagagttgtagttatttggattattatttattttaggagggttgtttttaaagtatttgtgttttggttttttttgtatgagatgtatatgtgattttggttgtttaaagggtttaggggttattgtgtttagatttggaagtgtgtgtgttttgtttgttgttattgtatggttttggatgagttttttgatttggggtttgtgtttgaagttaagtagttaggttgtttttttattaagatttttatatatgttttttggtttatgaatttaaaaagaaagatgaaggaaaatttgattttttatttatattaattttttatgttttttgtttatgtttttattgtgatatttggttttttttaaaatttaatttatttggggggggtatgaaaaataaaaaggtttttgggaattttgttatggaattagaggtttgaagaggggggtgataatgagattttttttaaaatataggtttattattgttaggtgtgaaagagaatagttggaaaatgaataagttttgtttttgttaaagttttatttggtgatatttttttttaagattaatagaattggggaaaggttttaaagagaggaatttaatttttaaaaatggttttattttatatttgagttaggttgttttttggtttgtttgtttttttttttaataagagttatgtgttttttttgttttagtattaaaaaaggtgataataagggagttatttataagttagttattaagatggagattgaggtttatgtttgaggtttttggagtttttgggtatatttaggaaggattttgttttggattttatatattttggttttttggatatttgtgatattttaaggtgttttttgtagtttaatttgtaaatatgttaggttttagggattttttgttgggtgtttttttgttttgggattatggttattttagagttatttgattgatggatgggatgtatttttagattaagtagtaggaatttaaagttgtttgttgtaattgtgtgagattgtgaagtggtttgaattttggaattataaattaagttatgttggtgggttattaatggttggaaaatatttttatttggggttttgttagagtgtgtttttaagtgttttggaaattttgttgtttttttaagtttttagataagaatgtgtattttttgtttaggttttgtttgggaaatttaattttttttttttggagatggggtatttttttttgatttttttttgttatgataaaatttttaatttgtattttataatttggggataaatggggataggaaggattaagttgtagagagaaaaagaaaataagagatatatattgtgatatattagggatatttttatagttttgttttttggattatagatattgtatagattttagggaatggtaggtttaagttttattttttggtggggatgagaagggagagagagttagagggataaagagaatgagaagatatggatgatttgggagagttttattttggaattagaattggaattatattttgtttattaagttataatgtaaggatagaataatataatattaagtttaaatttaattttttgttagtggagtagttatgttttatattttatagattttataaataatgaggttgttttttgaaaatgtgttgttgttgtgttttggaggagatatgagttttgagatgatttaatttgtttttgaatttggaggaaataggtagaaataaaatgattgtagaatttattttttgtaggttaaattttattttagttatttttgtaggatttttattgttaatttggaatggagatttttatttatttttttttttttgaagatgttaaattgtggtttagattaaatatattttaagttataaaagtaggaggttatttgtgtagggggttggtattatgtatttaggggtaa

SEQ ID NO: 88 - DNA, 3001 bp, Artificial Sequence
  chemically treated genomic DNA (Homo sapiens)
gaaagattgttgggtgtagtggtttatgtttgtaattttagtatttttagaggttgaggtgagtagaatatttgatgttaggagtttaagattagtttggttaatatggtgaaattttattttatttttattaaaaatataaaaattagttgggtgtggtggtgggtgtttgtaattttagttatttaggaggttgaggttggagaattatttgattttggaggtggaggttgtagtgagttgagattatattattatattttagtttggataatagagtgagattttgttttaaaaataataataataaaatttaaaatatttgtttaaagtttaagatatgtatatttgtgaaagttgattatataaattgggttatttttgaaatatttaattaaattagagttgaagggttagggggaagaagtatttggggtatatagtatttgttttaagaattaaattttttataagtttaattgttgaattagttttttgtatttttaagattagttttatttaatagttgttaaaatgaattgttatgattttaagattggttttatttattattattgtttattaattagagtttgttagtttttataagttttagtgtgaatgagtttttttttaaaatagtatgtaatattgtttttttttataaaatttggaatttttttttttttttttttgagatggaattttgtttttgttgtttaggttggagtgtaatggtgtgattttggtttattgtaatttttattttttgggtttaagtattttttttgtgttagttttttgagtagttgggatttaggtatgtgttattatgtttaattaattttgtatttttagtagagatggagtttttttatgttggttaggttggttttaaatttttgattttaggtgatttgtttgttttggttttttaaagtgttgggattataggtatgagttattatatttggttgtaattttttttttatttttttgattatattaatgattagtttggtttgtgtgtatgttatgaattgtagtttttgtttattaaataaaatgtttttagagatttgtttttatattatatttggttttgatataattatttttaaggaattttatttttaaaaatttatttttatagaaatgaaagtattaataaatgggaataagtatgataatttatattgtagaattgtttgtagtggtaaaagttgtaatattttaattgtttatgagtaaggaaatgattgaataaattattgtatatttatattaaagttaaatttgtaagtattgaagtataggtatggttattttttttttttttttgtggaaatagggttttattttgttatttaggttggagtgtagtggtattattttgggttattgtaatttttgttttttgagtttaagtgatttttatattttagttttttaagtagttgggattataggtatgtgttattatatttggttaattttggtttttggttttttttttaattggtatgtttatttaaaaatatagattaatgggttgggtatggtgatttatatttataattttagtattttgggaggttaaggtgggtggattatgaggttaggagattgagattattttggttaaaatagtgaaattttatttttattaaaagtataaaaaattagttgggtgtggtggtgggtatttgtagttttagttatttgggaggttgaggtaggagaatggtgtgaatttgggaagtagagtttgtagtgagttgagattgtgttattgtattttagtttgggtgatagagtaagattttattttaaaaataaataaataaataaataaaataataaaataaaatatagattaatgattttgtgttttaatgttattgtggttatgtgttgatgtttataaaatataagttataagggattttttataaatatattttagatagaagggtaaatagaaatgattgataagatagtgttattttagatatattttttttaattattaatatttgttagaaaatggagtttgatattatttataattatattaatatttatagaggttaattgttataggtattaagggtatattagggttaggagattttattttagattttttaaatatttttatattttagttattaagattagttattagagtttaatttgtttttaataagtagaatttttatgtttatttaaagagttttttatatttttttgggtttatttatttgtagagaatagtagaaattgtaattaggttttttatattatgtatttatatgtgatgtttaatttttatatgttgtttaatttttttaagataaatggagtgatttgtagtagggttatgtagatgagaaagttttgtatggagattatatttttgtgtattttttgttttatttttgtgaggtttagtttttgggtaaggtttttaatttggaagattagttgttttgttttgttttttttaatggtttttttatatttggaatttggtttatttttttgttttagttaatttttgtatttttagtagaaatggggttttgttatgttgtttaggttggttttgaatttttgggtataagggatttatttgttttggttttttaaagtgtttagattataggtatgagttattatgtttggtttaatatggttattattttttaaagtgttaaattatggttgggggttgtgatttatgtttgtaattttagtattttgggaggttgaggtgggtgaattatgaggttaggagatggagattagtttggttaatatggtgaaattttatttttattaagaatataaaaaattagttgggtgtggtggtaggtgtttgtaattttatttatttaggaagttgaggttggagaattgtttgaatttgggaggtggaggttgtagtgagtagagattatgttattgtagtttagtttgggtaatagtgtgagatttt

SEQ ID NO: 89 - DNA, 3001 bp, Artificial Sequence
  chemically treated genomic DNA (Homo sapiens)
agagttttgtattgttgtttaggttggattgtagtggtgtgatttttgtttattgtaatttttgttttttgggtttaagtgattttttagttttagttttttgagtagatgggattataggtgtttgttattatgtttagttaattttttgtatttttagtagagatggggttttattatgttggttaggttggtttttattttttgattttgtgatttatttgttttggttttttaaagtgttgggattataggtgtgagttatagtttttggttataatttagtattttaaaaaataatagttatgttgggttaggtgtggtggtttatgtttgtaatttgagtattttgggagattaaggtgggtagattttttgtgtttaggagtttaagattagtttgggtaatatggtgaaattttatttttattaaaaatataaaaattagttggggtgaggggataggttgagttttgggtgtaagggggttattagggagagtagagtgaggtagttgattttttggattgggggttttgtttggaagttggattttatggagatgaaatggaagatgtatgaggatatgatttttatatagaatttttttatttatgtggttttgttgtgagttattttatttattttaaagaaattggatagtatatgaagattggatattatatgtgaatgtatgatatgaagagtttggttatagtttttattgttttttgtaagtaaataggtttagaaaggtataagagattttttgaatggatataaaaattttgtttgttaagaataagttgagttttggtaattgattttaatagttaaaatataaaaatatttgggaagtttgaaatgaggttttttggttttggtgtgtttttaatgtttgtgatagttggtttttgtgaatattggtataattgtaaataatgttaaattttattttttagtaagtattaataattaagggaagtatgtttgaaatggtattgttttgttagttatttttgtttatttttttgtttggagtgtatttgtgaagagttttttataatttatgttttatggatattagtatataattataatgatattgaagtataggattattagtttatattttattttattattttatttatttatttatttatttttgagatggagttttgttttgttgtttaggttggagtgtagtggtataattttggtttattgtaagttttgttttttaggtttatgttatttttttgttttagttttttgagtagttgggattataggtgtttattattatatttggttaattttttgtatttttagtagagatggggttttattgttttagttaggatggttttgattttttgattttatgatttatttgttttggttttttaaagtgttgggattataggtgtaagttattatgtttagtttgttagtttatatttttaagtaaatatattaattaagaaagaagttaaaaattaaaattagttaggtgtggtggtatgtgtttgtagttttagttatttgggaggttgaggtgtgaggattatttgaatttaggaggtagaggttgtagtgatttaagatggtgttgttgtattttagtttgggtgatagagtgagattttgtttttataaaaagaaaaaaaaaatagttgtgtttgtattttagtatttataaatttaattttagtatagatgtatagtaatttatttaattatttttttatttatagataattaggatgttgtaatttttgttattataaataattttgtgatgtggattattgtatttatttttatttattggtgtttttatttttataagaatggatttttaaagatagaattttttgggaatagttatgttaaagttaaatataatatagagataaatttttaaaaatattttatttggtaagtaagagttgtaatttatggtatatatatagattgggttgattattggtatgattaggagaataaagggaaggttgtggttaggtgtgatagtttatgtttgtaattttagtattttgggaggttgaggtgggtagattatttgaggttaggagtttgagattagtttgattaatatggagaaattttgtttttattaaaaatataaaattagttgggtatagtggtgtatgtttgaattttagttatttaggaggttgatataggagaaatgtttgaatttgggaggtgaaggttgtagtgagttgagattgtgttattgtattttagtttgggtaataagagtaaaattttattttaaaaaaaaaaaagagaaggttttgggttttatgagaaagaatagtattatatattgttttggaagaaagtttatttatattagagtttgtgggagttagtaagttttgattggtgagtgatggtggtaggtaaaattagttttagagttatggtagtttattttagtagttattaggtaaaattggttttagggatatagaaggttggtttagtagttggatttgtggaaaatttaatttttgaagtagatgttgtgtgttttgaatgttttttttttttggttttttaattttgatttagttgagtattttaagaatgatttaatttatgtaattaatttttataggtatatatgttttaaattttaaatagatgttttgggttttgttgttgttgtttttgagatggagttttattttgttgtttaagttggagtgtagtggtgtgattttggtttattgtaatttttgtttttagggttaagtgattttttagttttagttttttgaatagttgggattataggtgtttgttattatgtttagttaatttttgtatttttagtagagatggggtggggttttattatgttggttaggttggttttgaatttttgatattaagtgttttgtttattttagtttttgaaagtgttgggattataggtgtgagttattgtgtttggtagtttttt

SEQ ID NO: 90 - DNA, 2501 bp, Artificial Sequence
  chemically treated genomic DNA (Homo sapiens)
aatttaaaagagaaatttgaaaggtttattgggtagtgataagagtaataatattggtattgtttttgttatatatagtaggttaaagttaggaatttagttttttagaaaattaaaaataaaattaaagaaaattttaaaacgtgagttggaaatagtagtataatttattgaggttttttttttgataatatttattttttttttttatattaaaaaggttaggagtataattatttaggtaggattaaatgttttttgcgtttaaattgttttaattatcgttttttataaaaggaatttaggatttttggataaatgacggtttttaggtgtgggttagtataggtgggatttggattattttcggttttgttttggggtttgtttttagagattgagtttcgttttgtcgtttaggtcggagtatagtggtgcgatttcggtttattttaatttttgtttttcgagtttaagtaattgttttgttttagtttttttagtagttgggattataggtatttgttattatatttggttaatttttgtattttagtagagacggggttttatagttaatttttgtattttattagagatggggttttattatgttggttaggttgttttggaatatttgattttaggtgattcgttcgttttagttttttaaagtgttgggattatagacgtgagttattatgtttagttagaatatgttttaataaaaagttaagaagtttttagatttttgttttgtaaatattgggttaatttggaatttttattgattaaaaataagagatttgaggtattaaaatgacgattatatgtttttaatatattaagtgtataagatttgtgagtttatattaaaaatgtaaaagtttatttttgggttatttttggagaatgttggtattaatttatttttaaagttggtaattaagaggaataaaaaataaataaaacgagtattttttttttttttggttgaaattgtgttttagggtaattaaataattataaggaagttttttttaatagaattttaattaatagatgtggaattttaagaagtttttaaaagtgatttttgtaatattaatggtagttaaaattttaaggaagaaggttggtgggttgggtatggtaggttacgtttgtaattttagtattttggggggtcgaggtaggcggattatttgaggttaggagtttaagattagtttgattaatatggtgaaattttgtttttattaaaaatattaaaattagcgaggtatggtggtatacgtttgtaattttagatatttgggaagttgcggtaggagaattttttgaatttaggaggcggaggttgtagcgaggcgagattgcgttagtgtagtttagtttgggcgatagagtaagattttattttaaaaaaaaaaaaaaatagaaaaaagaaaaagagtgtggggtttttttgtttttgtttttgagatggagtttcgttttgttgtttaggttggagtgtattggcgtaattttagtttattgtaatttttgtttttcgggtttaagtgattttttatgttttagttttttgagtagttggggttataggtgtgtattattatatttagttaatttttgtatttttagtaaagacggggtttcgttatgttggttaggttggttttaaatttttggttttaagtgatttattcgttttggttttttaaagggttgggattataggcgtgagttacgtgttggttttaaaattgtgtttataagttaggtatgatggttcgatattcgggaggtcgagagttggaggattagttgagtttaggggtttaaggttgtagtgagttgtgattgtattattgtattttagtttgagtgatagagtaggagtatattttaaaaaaaaaaaaaagaaagaaaattaaaaagttaaataaaataaaattagaaattagaaatataataaatattaaaatttaagattgtaaaatattaaatttatatttatatttttatatataataatataattttaagttgaaatatattataaataaaataagtaatgtttattgttcgataatttaagtattaataattaaaataaattaaattggaatgaaataaatatataaataaaaatttaacgaattgtatttttattatatgtattgttgttttaaagaaaaaaaaatataaaattagtagtatattaatagttaatattgatggatataaaaatatattttgaagtataaagggttgtaggaaaataattggtatttttatatatttagaaatgtggttaaaaagagaaatttgaaagtttaaaaaattttagtataatataaatcgatttgtttttaaatagatttggtgatttttttttttaaatataggtttaaattttagttttttattattatatattttttttaagatttatggttttagttatagtaagttttttgtaatatttattggat

SEQ ID NO: 91 - DNA, 2501 bp, Artificial Sequence
  chemically treated genomic DNA (Homo sapiens)
atttaatgagtgttatagagagtttgttgtgattagaattataaattttaaagggggtatgtgataatagagggttggaatttaaatttgtatttaaaaaaaagaattattaaatttatttgaaaataagtcgatttgtattatgttggaattttttgggtttttagatttttttttttaattatatttttgaatgtataaaaatattaattatttttttatagttttttgtattttaaaatatgtttttgtgtttattagtattaattattggtatattattggttttatatttttttttttttgagataatagtatatataatagaggtataattcgttggatttttgtttatgtatttattttattttagtttgatttattttaattgttgatatttaagttgtcgaatagtagatattatttgttttatttatgatatattttagtttaaagttatgttattatatgtggaagtgtaaatatagatttggtgttttgtaattttgagttttagtgtttattgtgtttttggtttttgattttgttttatttaattttttagtttttttttttttttttttttttgagatgtgtttttgttttgttatttaggttggagtgtagtggtgtaattatagtttattgtagttttgaatttttgggtttaattgattttttagttttcggtttttcgagtatcgagttattatgtttggtttataaatataattttaaggttagtacgtggtttacgtttgtaattttagttttttggaaggttaaggcgggtggattatttgaaattaagagtttgagattagtttggttaatatggcgaaatttcgtttttattaaaaatataaaaattagttgagtgtggtggtgtatatttgtggttttagttatttaagaggttaaggtatgagaaattatttgaattcgggaggtaaaggttgtagtgagttgagattgcgttagtgtattttagtttgggtaatagagcgagattttattttaaaaataaaaataagaaaattttatatttttttttttttttttatttttttttttttttgagatagggttttgttttgtcgtttaggttggattgtattggcgtaatttcgtttcgttgtaattttcgttttttggatttaagagatttttttgtcgtagttttttaagtatttgggattataggcgtgtgttattatgtttcgttaattttggtatttttagtagagatagggttttattatgttggttaggttggttttgaatttttgattttaagtgattcgtttgtttcggttttttaaagtgttgggattatagacgtgatttattatgtttagtttattaatttttttttttaggattttagttgttattgatgttgtaaaagttatttttaaagattttttaaaattttatatttgttaattgaaattttattaagaagagtttttttatgattatttggttattttgaaatatagttttaattaaaaaaaggagaaatgttcgttttgtttgttttttattttttttgattattagttttgaggatgagttggtgttagtattttttagaggtgatttaggaataagtttttatatttttggtatgagtttataagttttatatatttgatgtgttgagagtatgtggtcgttattttgatgttttaagttttttgtttttggttagtgggagttttaagttggtttagtgtttgtaggataaaagtttgaaggttttttaattttttgttaaaatatgttttggttgggtatggtggtttacgtttgtaattttagtattttgggaggttgaggcgggcggattatttgaggttaggtgttttagaatagtttggttaatatggtaaaattttatttttagtaaaatataaaaattaattgtgaaatttcgtttttattaaaatataaaaattaattaggtgtggtggtaggtgtttgtaattttagttattagggaggttgaggtaggatagttgtttgaattcgggaggtagaggttggagtgagtcgagatcgtattattgtatttcggtttgagcgatagagcgagatttagtttttaaaaataaattttaaaataaaatcggagatgatttaaattttatttgtattgatttatatttgggaatcgttatttatttaaggattttgggttttttttatgggaagcggtaattagggtagtttgggcgtaaggggtatttagttttatttgggtggttgtgtttttggtttttttaatgtagggaaaggaaataaatattattaaaaaggaaattttagtgaattatattgttatttttaatttacgttttagagttttttttgattttgtttttgattttttgaaaagttgggtttttggttttaatttattgtatataatagaaataatgttaatgttattgtttttattattgtttaatgaattttttagattttttttttgagtt

SEQ ID NO: 92 - DNA, 4001 bp, Artificial Sequence
  chemically treated genomic DNA (Homo sapiens)
tttgtttttttgaatagatttaattggttatgtgaatttattatgtgatagaggtgttattttaaagtagagagggaaaagatggattagtttgtatatgatgtagaggtaagagattatgattttgaagagtaattaagttgaattcgtatagaaaataaattttgaaatgattaaatatttaaatgtaaataataaagttataaaagtgtttgaaaaaaaaaacggggtttgttataggagtgtgaaaagtatttttaagtaagtagtagaatttagttgtgatgaaggaaaaatggatatatttgattatataataattaaatatttttgtttggtaaaaattattataaataatatgaaaaatatttgtaatatgtgatatgtataggagagatattgttggcgggaatgttatttatttattttttaggagtaagttgataaattttgtattaaaatggaagatttttttgtagtatttgagttagtaaaaaatattataaataataaaaagtgtattaagtaatttaaatgtatatgtgtattggattggtttaataaattatgggatatttatgtaagaaaagattatgtagttgtttagaaaaatgtgtattaacggaaagatgttttatatataattggaaaaaaataggtcgtagaatagaaggtatgtatagtgtattatttgtcggagagagaatttgaataattagtatacgaatagaaaaaaaatttggatagtaaaatgttaatagtggttatttttgggagatgagtggttttttattggtgtgttatatattattgtattgtttgaatttttataataataataaaagaataatatattatttttgtaataagaaaaaatgaagatataaaaataaatttaatgaatgatttgtttttagggggcggtttgagttggaagagttttagattgagtttggtatagtggtataaatatgggttttggcgttagatagttttgagcggggttttattgttttattttcgaggaaggcgagggggggtggtagggggttgcggaaaggggttgggttgggttgggttgtttgtagttttagtttaggaggttgagatttcgagagggatttagagaaggtagacgtatttcgaattcgttggaggataaggtgaggggcgttgatattggggttttatggaggttagatagtggttttagatttttcgaatttatagttaggtagatgagtaatttttattgtattattgtagttgaagtagaggtgatttggagtggggtgtaggtaatgaggacgattgagaaagtagtaggttgtatagattgggagtagagattagcggagggaggaggggagaaaaacggggaattaggaatgttgggagggggacgaggaatataaggagggaggggaatattgagggggagtgaagatttagagaagagaatcggggatgtagagagggattaaggaatattgaggggtagggtgtgtaaacgtaatacggaggaggatgtaagaaatgggaagaaggaattttggagtaaataggaaatgtgaggtaggaatagggagtagggagttaggttaagggaatacggaggggggtataaggaatgaggagtagggagcgggggaggggtagataggttgggacggaggttttttagggaggcggaaaggggcgggattattttcggtttagagaggggagggtagttttcgagtttcggaggggtttggagtgagtggacgtattcgggaattgtaggaggacgaggtgagtagtcgggtcggtttttggatgagagtttcgttaggggtcggttttattttttgggatttggagaaaatttgttttaaggatcggatcgtatcggatttattcggttgggaagggaggggattggattcggtttggtcgggtttaagatggaattattagtttagtatttatttgaggagggggtgtaatagggaaggggcggaattaagatgcgtttgtttggaggggggcgtgttaggaagaagggcggggttaagagatattggattttgtagggcgtgagtaggggaggggtcgggtttattagatattgcgataattttggaggaaggtttgttgggtagggggcgggatcgaatggtattgcggatttggagaggggcgtgtgttggggtagagtgttagattgagattacgattattgcgtatgcgtattatgtttcgttagaaaggggcgtgttgagaagggttagtattgagaagagttagttgttgaatgcgtatgtgtacggtggatattaaagaaagggttcgtgttgggaaagcgggcggggttgagagcggttttgtagtcgacgcgtatgcgttttatcgatttgcggttgggtggggggtgtattgggaaaaggggcggggtttttagagttgtcgcgttggtatatttttttggagaaggggagggtgcggttgtagagaattgagatttagaagttttgaatttttgtatttgagaacggagtcgttgggggtggtggagggggttggaattggggatttacggaaggtgaggattagtttttaggtataataggggagaggacgtttagtgggttttaatttgatttaggtttttttttttttaggtttagtttttgttaggttaaattgagatatgtttgatataagcgagagtggtgtaggtttaattcgtttttaggtaaggtttttttttgttttttttttagttgttttttttttttagtttttgttgttgtttttaagttttttggtttttttttttttatttttgtttttttttatttatttttttgtttgggtgtttttttgtttagtggagggagggagagaaggtgggcgggttttttttttgttattagtttttgtttagaggaaagggaggttttgttgggttgaggtggttagagtatatcgtaggtaggagttagtataggttagagaagtgtggttttggaattttggagttatttgtttagttgggggtgaggagaaggtttatgaatttttttgtttttttttgtaggttgaagttttagaaaaggatagtagttcgatgatgtagattttgttgatagtgatttagaatgtggaggttttagagatatcgaaggttttaaaggtattggaggttttagaggatgtgaaggttttaaaagtttttggggttttaaaggttatagaggttttaaagattttagaggttcgggaggtatttgttatttaggttttatttattatttagttgattgatatttaggttttggtagttgaaaataagagtttagtagttgatattaagaaatagaatgttgattcgtaggttgtgataatgtttgttattgagattaaaaaggttagttatgtggttgatataaaggttaatataaaggtttaggagattgaggttgtatttttttaggttttagtagatgaatttgagtttgagagtgtagttgtttagttttaggagaattaggatattcggtttaaggttaaagttaagaaagttcgaaaggtaagatttttgtagttattatttttggttttttattttttttttagttgatttatttgttttataaatatttagaaagatttttgtgtttattagggttgtggggggtattgagagtaatgtgatgtaatttttgtttttagagagtttgtagattgatggggaggtgtaatttgaatgtaatgtagtttatgtttatatagtagttgttttgtattaggttttgagttaagtatatttatgtaggttattttattaaattttgaaagtaatttttatagttttaattttatggagaaggaagttgagttttagagaggtgaagcggtttgtttaggatggtttaagtagagttagtagtgggtatagaaagagaagaagatttagtttttatttatttttggtttgtttttggtttgttaggtag

SEQ ID NO: 93 - DNA, 4001 bp, Artificial Sequence
  chemically treated genomic DNA (Homo sapiens)
ttgtttagtaggttaggagtaaattaagggtgggtggaggttgagtttttttttttttttgtgtttattattggttttgtttgaattattttagataagtcgttttatttttttggaatttagtttttttttttataaaattggggttatgagaattatttttaagatttaatgagataatttgtataaatgtgtttagtttaaggtttaatatagggtagttattatgtaaatataaattgtattatatttagattgtatttttttattagtttgtaagttttttgaagataggaattatattatattatttttagtgttttttatagttttgatgagtatagggatttttttaaatgtttgtagaataaatgaattaattgagagaggagtagaaaattaagggtggtgattgtagaggttttatttttcgggtttttttggttttgattttgggtcgagtattttgatttttttgagattgggtagttgtatttttaggtttaggtttatttgttggggtttgagagggtgtagttttagttttttgagtttttgtattgatttttgtattagttatatggttgatttttttggttttagtggtaggtattgttatagtttgcgggttagtattttgttttttggtgttagttgttagatttttgtttttagttgttagaatttgggtattagttagttgagtagtagatgaggtttgggtggtaggtgtttttcgagtttttggggtttttgagatttttgtggtttttgagattttagaggtttttgagatttttatattttttgagatttttagtgtttttgaggttttcggtgtttttgggatttttatattttgggttattgttaatagagtttgtattatcgagttattgtttttttttgaagttttagtttgtaagaggaagtagggaagtttatagattttttttttatttttaattaagtaaatggttttaaaattttaaggttatatttttttgatttgtattgatttttatttgcggtgtgttttgattattttagtttaataaggttttttttttttttgagtaagaattgatggtagaagaggggttcgtttattttttttttttttttttattgggtagggggatatttaggtaggaaagtaggtggagaaggataaggatgggaggggaagagttaagggatttgggggtagtaataagggttggagaggaaaagtagttggggaaaggatagaaagaggttttatttggaagcgagttagatttgtattattttcgtttgtgttagatatgttttaatttggtttggtaagagttgagtttgaaggggagaaggtttgggttaagttgaagtttattgaacgtttttttttttgttgtgtttggaggttgatttttatttttcgtaggtttttaattttaattttttttattatttttaacgatttcgtttttagatataggaatttaaagtttttaagttttaattttttgtagtcgtattttttttttttttaggaagatgtgttagcgcggtagttttgaggatttcgtttttttttttagtgtattttttatttagtcgtaggtcgatagagcgtatgcgcgtcggttgtagggtcgtttttagtttcgttcgtttttttagtacgagttttttttttgatgtttatcgtgtatatgcgtatttagtagttggttttttttagtgttggttttttttaatacgtttttttttagcgaaatatagtgcgtatgcgtaatggtcgtggttttagtttggtattttgttttaatatacgtttttttttaggttcgtagtattattcggtttcgttttttgtttaataagtttttttttaaaattgtcgtagtgtttggtggattcggttttttttttatttacgttttatagagtttagtgttttttggtttcgtttttttttttaatacgtttttttttaaataggcgtattttggtttcgttttttttttattatattttttttttaaataaatattgagttagtgattttattttgggttcggttaaatcgggtttagttttttttttttttagtcggatggattcggtacgattcggtttttaaggtaggttttttttagattttagagggtggggtcgatttttagcggggtttttatttaaaagtcgattcggttgtttatttcgtttttttataattttcgagtgcgtttatttattttaagttttttcgaaattcggagattgtttttttttttttaggtcggaagtggtttcgttttttttcgtttttttagggggttttcgttttagtttgtttgtttttttttcgttttttgttttttattttttatgttttttttcgtatttttttagtttggttttttattttttatttttattttatattttttatttattttagaattttttttttttattttttatattttttttcgtgttacgtttgtatattttgttttttagtattttttaatttttttttgtattttcgatttttttttttggatttttatttttttttagtgtttttttttttttttgtatttttcgttttttttttaatatttttggtttttcgttttttttttttttttttttcgttagtttttgtttttagtttgtatagtttattatttttttagtcgtttttattgtttatattttattttaggttatttttgttttagttgtagtggtgtagtaagaattgtttatttgtttggttatgggttcgaggggtttggaattattgtttgatttttataaaattttaatattaacgttttttattttgttttttagcgagttcgggatgcgtttgttttttttaagtttttttcgaagttttagttttttggattagagttgtagatagtttaatttagtttagttttttttcgtagttttttgttattttttttcgtttttttcgggggtggggtaatggggtttcgtttagggttgtttgacgttaaagtttatgtttatgttattgtattaggtttagtttgaagtttttttaatttaaatcgttttttgaaagtaagttatttattgaatttatttttatatttttatttttttttattataaaggtaatatgttgtttttttgttgttgttgtaaaaatttaaataatgtagtaatatataatatattaatgaaaggttatttattttttagaaataattattattaatattttgttatttagattttttttttattcgtatattaattatttaggtttttttttcgataaatggtatattatatatattttttgttttgcgatttgtttttttttagttatatataaaatattttttcgttagtgtatatttttttaaatagttgtatgatttttttttgtatagatgttttataatttattgaattagtttagtatatatgtatatttagattgtttggtgtattttttgttatttatggtattttttgttagtttaaatgttataaaaaagttttttattttgatgtaaaatttgttaatttatttttaaaaagtaaatggataatattttcgttagtaatgttttttttgtatatgttatatattataaatattttttatgttatttatgataatttttgttaaataaaaatgtttaattattatgtagttaaatatatttattttttttttattataattggattttgttgtttgtttaaagatgttttttatatttttataataaatttcgtttttttttttaagtatttttgtggttttattatttatatttagatgtttgattattttaaaatttattttttatacggatttagtttgattattttttaaaattatagttttttatttttatattatgtgtaaattaatttattttttttttttttgttttgaaatggtatttttattatataataaatttatataattaattggatttgtttaagagaataaa

SEQ ID NO: 94 - DNA, 2501 bp, Artificial Sequence
  chemically treated genomic DNA (Homo sapiens)
aggaatatagttaaagattttgggaattaagatgaggatattttggaggggttattatttagtttattatggaagatattatgagagggagttaatataaaatgttttagaaatagagaaaggtagttaggtatagtagtttatgtttttaattttagtattttgggagggaggcgggtggattgtttgaggttaggggtttaagattagtttgattaatatggtgaaattttatttttattaaaaatataaaaattagttgggtatggtggtaggtgtttgtaattttagttattcgggaggttgaggtaggagaattatttgaatttaggaggcggaggttatagtgagtcgagattatattattgtattttagtttgggcgataagtatgagattttattttaatttaataaaaaaaagaaaaaagaaaaaaaaaaaaaagaaatagagaaaagttggttaattttttatagtgggaaaaatgttttaggaaattatagtttttatattaaatatttaaatgagttaaaatttatttaattggtaattttagttttatttttttaaatatgtaaattatttaaatttttattaaattttttatattaggttagttaagttttaaaatgtttatatattttttaatagaaatttttaattattatttttattttttaaggaaatggttgtgtgtttttgattttgttttgatagaatcgttagtggtttttgaattatggtatttaatttatggtatggttagcgagttataaagtgttttagtattaattaagtaaagttataaaagtagatttagtggataataaggaatattagttttagagttaaaaagatttgggttgggttttagttttgttatttattagttgtgtaatatcggaaaagttattttttttttttaattttggtttttttatttgtgatatgatagtggttagaggattttatttatagaattattgtgatgataagagtagttaagggtaagtttttgtatagggtttttttggttattattgggttaataagatataattatatgttttatttttatttttaaaatttaaatagtttttaaaaataagttattgtagtttatttggaagaaaagattgatatgaattaatatgtaattatttataatttttttttattttttttattgtgaatatttgttgtggaaatattaatatgtttggtttttattggggtaggattttatatgtgtaggattttattggggtgttatatatatatatagtagatatgttttattatttttttaaaattggataattaaattttataatttatttagtttaaaggttttagagacggtagatttgtatttttatgagggcgaggatgagaatataatttggtttgttattatgtattaaggtatttgttgtttttatgaagatgtttgtagttagttagttagtttttataaattttatttttaatttcgttatgtttttttttttggaattttttaaggggtttttagaatttgtatttagtttttataggttgagattagggtgatattttgggaaatttgtttagtgatagttaaggtgtagttttagatgaaaggtatataattttaaatataaaaaagttatttaggttaggtttagtggtttatgcgtgtaattttagtattttaagagattgaggtagatagattatttgaggttagaagtttaagattaggttggttaatatggtaaaattttgtttttataaaatatataaaaattaataggtatggtggtgtatatttgtaattttagttatttaggaggttgaggtataagaatcgtttgaatttgggaagtagaggttgtagtgagttaagtttgtattattgtattttatttaggttgggtaatagagtgagattttattttaaataaataaataataaagttatttaattaaagaatcgattattaagtagaagtataaagtttaggttttattaggtttttaattgtatattagtgattgtgaaaaagtaattatttttataattaaaatataaattataaaaaaatagatttaaagaaaagaaagatgatagagtgaaagaaggtatatttttttcgtgtttaaattacggagtttataatatagtagtatatatagttgggcgttttgtggtttcggtattttcggttttttttttacggggtcgttttcgattagtagaaggttgaaaataaaggaaaatggagaaatgtttaaaagaaaattattggtttttttaagattattaaagttttttaatatgtttttagtaaagtgggggtatttgatgtgaaattttagaattaaaaattattggttgttattattgataattgagtttttattatagtttttaatttagatatgtttatttaatagatattttttttttttatggtttttgatttttgaacgatgtatattgaaagtaagtagtataat

SEQ ID NO: 95 - DNA, 2501 bp, Artificial Sequence
  chemically treated genomic DNA (Homo sapiens)
gttatgttatttgtttttagtatatatcgtttagaggttagaagttataagggagagaaatatttattagataagtatgtttgagttgggggttgtggtgaggatttagttgttaatgatgataattagtaatttttggttttagaattttatattaaatgtttttattttattggaagtatattgaggaattttgataattttaaagaagttagtgatttttttttgaatatttttttatttttttttatttttagttttttattagtcgaaagcggtttcgtgaaggggaagtcgagggtgtcgagattataaagcgtttagttgtgtgtgttgttgtgttgtgaatttcgtggtttgaatacgaaagaaatgtatttttttttattttgttattttttttttttttgagtttgtttttttatagtttgtattttaattatgggaataattgtttttttatagttattgatgtataattaaaaatttgatggaatttgggttttgtgtttttgtttgataatcggttttttagttgaatggttttattatttatttatttgagatggagttttattttgttgtttagtttgaatgaagtgtagtggtgtaggtttggtttattgtaatttttgttttttaggtttaagcgatttttgtgttttagttttttgagtagttgggattataggtatgtattattatgtttgttaatttttatatattttgtagagatagggttttgttatgttggttagtttggttttgaatttttgattttaggtgatttgtttgttttagttttttaaagtgttgggattatacgtatgagttattgagtttagtttgaatggtttttttatatttaaagttgtgtgttttttatttggagttatattttggttattattaggtaggttttttaggatgttattttggttttagtttgtgagagttgaatataaattttaagggttttttggaaagttttagggaagggagtatagcgaggttgggggtggagtttgtagagattggttggttggttgtagatatttttatgagaatagtaggtattttggtgtatgataataggttaggttatatttttattttcgtttttataaagatataggtttatcgtttttgaaatttttgggttagataagttgtgaaatttaattatttaattttaggaaggtggtaaggtatatttattatgtgtatgtgtagtattttagtggagttttatatatgtggagttttattttagtggagattaaatatgttaatatttttatagtaaatatttatagtaagagggatagagaaagattataggtagttgtatattggtttatattagtttttttttttaaatgagttataatgatttgtttttgagagttgtttgggttttggaagtggagataaggtatgtggttatgttttgttgatttaataatgattagggaggttttgtgtaaagatttatttttggttgtttttgttattatagtgattttatgagtgaggttttttagttattgttatgttataggtgaggaaattaaagttagaagaggaaggtaattttttcgatgttgtatagttggtaaatggtagagttgggatttaatttaggtttttttgattttaaaattaatgttttttattgtttattaaatttgtttttataattttgtttggttgatgttaggatattttgtagttcgttggttatgttatgaattgagtgttatggtttaaaggttattggcgattttgttagggtagggttaagggtatatagttatttttttaggaaatgggggtggtggttggaaatttttattaaagggtatataagtattttgagatttggttggtttggtgtagggggtttgatgggaatttaggtagtttgtatgtttaaaggaatgaggttgagattgttaattagatgggttttagtttatttgaatatttaatgtggaggttgtggttttttgggatattttttttattgtggagagttagttagtttttttttgttttttttttttttttttttttttttttttttttattaaattgagatgaagttttatgtttgtcgtttaggttggagtgtaatggtgtgatttcggtttattgtaattttcgttttttgggtttaagtgatttttttgttttagtttttcgagtagttgggattataggtatttgttattatgtttagttaatttttgtatttttagtagagatggggttttattatgttggttaggttggttttgaatttttgattttaggtaatttattcgttttttttttaaaatgttgggattagaggtatgagttattgtgtttggttgtttttttttgtttttagagtattttgtattaatttttttttatgatattttttatggtaggttgaataatggtttttttaaagtgtttttattttaatttttagaatttttgattatgttttt

SEQ ID NO: 96 - DNA, 2501 bp, Artificial Sequence
  chemically treated genomic DNA (Homo sapiens)
aatttaaaagagaaatttgaaaggtttattgggtagtgataagagtaataatattggtattgtttttgttatatatagtaggttaaagttaggaatttagttttttagaaaattaaaaataaaattaaagaaaattttaaaatgtgagttggaaatagtagtataatttattgaggttttttttttgataatatttattttttttttttatattaaaaaggttaggagtataattatttaggtaggattaaatgttttttgtgtttaaattgttttaattattgttttttataaaaggaatttaggatttttggataaatgatggtttttaggtgtgggttagtataggtgggatttggattatttttggttttgttttggggtttgtttttagagattgagttttgttttgttgtttaggttggagtatagtggtgtgattttggtttattttaatttttgttttttgagtttaagtaattgttttgttttagtttttttagtagttgggattataggtatttgttattatatttggttaatttttgtattttagtagagatggggttttatagttaatttttgtattttattagagatggggttttattatgttggttaggttgttttggaatatttgattttaggtgatttgtttgttttagttttttaaagtgttgggattatagatgtgagttattatgtttagttagaatatgttttaataaaaagttaagaagtttttagatttttgttttgtaaatattgggttaatttggaatttttattgattaaaaataagagatttgaggtattaaaatgatgattatatgtttttaatatattaagtgtataagatttgtgagtttatattaaaaatgtaaaagtttatttttgggttatttttggagaatgttggtattaatttatttttaaagttggtaattaagaggaataaaaaataaataaaatgagtattttttttttttttggttgaaattgtgttttagggtaattaaataattataaggaagttttttttaatagaattttaattaatagatgtggaattttaagaagtttttaaaagtgatttttgtaatattaatggtagttaaaattttaaggaagaaggttggtgggttgggtatggtaggttatgtttgtaattttagtattttggggggttgaggtaggtggattatttgaggttaggagtttaagattagtttgattaatatggtgaaattttgtttttattaaaaatattaaaattagtgaggtatggtggtatatgtttgtaattttagatatttgggaagttgtggtaggagaattttttgaatttaggaggtggaggttgtagtgaggtgagattgtgttagtgtagtttagtttgggtgatagagtaagattttattttaaaaaaaaaaaaaaatagaaaaaagaaaaagagtgtggggtttttttgtttttgtttttgagatggagttttgttttgttgtttaggttggagtgtattggtgtaattttagtttattgtaatttttgttttttgggtttaagtgattttttatgttttagttttttgagtagttggggttataggtgtgtattattatatttagttaatttttgtatttttagtaaagatggggttttgttatgttggttaggttggttttaaatttttggttttaagtgatttatttgttttggttttttaaagggttgggattataggtgtgagttatgtgttggttttaaaattgtgtttataagttaggtatgatggtttgatatttgggaggttgagagttggaggattagttgagtttaggggtttaaggttgtagtgagttgtgattgtattattgtattttagtttgagtgatagagtaggagtatattttaaaaaaaaaaaaaagaaagaaaattaaaaagttaaataaaataaaattagaaattagaaatataataaatattaaaatttaagattgtaaaatattaaatttatatttatatttttatatataataatataattttaagttgaaatatattataaataaaataagtaatgtttattgtttgataatttaagtattaataattaaaataaattaaattggaatgaaataaatatataaataaaaatttaatgaattgtatttttattatatgtattgttgttttaaagaaaaaaaaatataaaattagtagtatattaatagttaatattgatggatataaaaatatattttgaagtataaagggttgtaggaaaataattggtatttttatatatttagaaatgtggttaaaaagagaaatttgaaagtttaaaaaattttagtataatataaattgatttgtttttaaatagatttggtgatttttttttttaaatataggtttaaattttagttttttattattatatattttttttaagatttatggttttagttatagtaagttttttgtaatatttattggat

SEQ ID NO: 97 - DNA, 2501 bp, Artificial Sequence
  chemically treated genomic DNA (Homo sapiens)
atttaatgagtgttatagagagtttgttgtgattagaattataaattttaaagggggtatgtgataatagagggttggaatttaaatttgtatttaaaaaaaagaattattaaatttatttgaaaataagttgatttgtattatgttggaattttttgggtttttagatttttttttttaattatatttttgaatgtataaaaatattaattatttttttatagttttttgtattttaaaatatgtttttgtgtttattagtattaattattggtatattattggttttatatttttttttttttgagataatagtatatataatagaggtataatttgttggatttttgtttatgtatttattttattttagtttgatttattttaattgttgatatttaagttgttgaatagtagatattatttgttttatttatgatatattttagtttaaagttatgttattatatgtggaagtgtaaatatagatttggtgttttgtaattttgagttttagtgtttattgtgtttttggtttttgattttgttttatttaattttttagtttttttttttttttttttttttgagatgtgtttttgttttgttatttaggttggagtgtagtggtgtaattatagtttattgtagttttgaatttttgggtttaattgattttttagtttttggttttttgagtattgagttattatgtttggtttataaatataattttaaggttagtatgtggtttatgtttgtaattttagttttttggaaggttaaggtgggtggattatttgaaattaagagtttgagattagtttggttaatatggtgaaattttgtttttattaaaaatataaaaattagttgagtgtggtggtgtatatttgtggttttagttatttaagaggttaaggtatgagaaattatttgaatttgggaggtaaaggttgtagtgagttgagattgtgttagtgtattttagtttgggtaatagagtgagattttattttaaaaataaaaataagaaaattttatatttttttttttttttttatttttttttttttttgagatagggttttgttttgttgtttaggttggattgtattggtgtaattttgttttgttgtaatttttgttttttggatttaagagatttttttgttgtagttttttaagtatttgggattataggtgtgtgttattatgttttgttaattttggtatttttagtagagatagggttttattatgttggttaggttggttttgaatttttgattttaagtgatttgtttgttttggttttttaaagtgttgggattatagatgtgatttattatgtttagtttattaatttttttttttaggattttagttgttattgatgttgtaaaagttatttttaaagattttttaaaattttatatttgttaattgaaattttattaagaagagtttttttatgattatttggttattttgaaatatagttttaattaaaaaaaggagaaatgtttgttttgtttgttttttattttttttgattattagttttgaggatgagttggtgttagtattttttagaggtgatttaggaataagtttttatatttttggtatgagtttataagttttatatatttgatgtgttgagagtatgtggttgttattttgatgttttaagttttttgtttttggttagtgggagttttaagttggtttagtgtttgtaggataaaagtttgaaggttttttaattttttgttaaaatatgttttggttgggtatggtggtttatgtttgtaattttagtattttgggaggttgaggtgggtggattatttgaggttaggtgttttagaatagtttggttaatatggtaaaattttatttttagtaaaatataaaaattaattgtgaaattttgtttttattaaaatataaaaattaattaggtgtggtggtaggtgtttgtaattttagttattagggaggttgaggtaggatagttgtttgaatttgggaggtagaggttggagtgagttgagattgtattattgtattttggtttgagtgatagagtgagatttagtttttaaaaataaattttaaaataaaattggagatgatttaaattttatttgtattgatttatatttgggaattgttatttatttaaggattttgggttttttttatgggaagtggtaattagggtagtttgggtgtaaggggtatttagttttatttgggtggttgtgtttttggtttttttaatgtagggaaaggaaataaatattattaaaaaggaaattttagtgaattatattgttatttttaatttatgttttagagttttttttgattttgtttttgattttttgaaaagttgggtttttggttttaatttattgtatataatagaaataatgttaatgttattgtttttattattgtttaatgaattttttagattttttttttgagtt

SEQ ID NO: 98 - DNA, 4001 bp, Artificial Sequence
  chemically treated genomic DNA (Homo sapiens)
tttgtttttttgaatagatttaattggttatgtgaatttattatgtgatagaggtgttattttaaagtagagagggaaaagatggattagtttgtatatgatgtagaggtaagagattatgattttgaagagtaattaagttgaatttgtatagaaaataaattttgaaatgattaaatatttaaatgtaaataataaagttataaaagtgtttgaaaaaaaaaatggggtttgttataggagtgtgaaaagtatttttaagtaagtagtagaatttagttgtgatgaaggaaaaatggatatatttgattatataataattaaatatttttgtttggtaaaaattattataaataatatgaaaaatatttgtaatatgtgatatgtataggagagatattgttggtgggaatgttatttatttattttttaggagtaagttgataaattttgtattaaaatggaagatttttttgtagtatttgagttagtaaaaaatattataaataataaaaagtgtattaagtaatttaaatgtatatgtgtattggattggtttaataaattatgggatatttatgtaagaaaagattatgtagttgtttagaaaaatgtgtattaatggaaagatgttttatatataattggaaaaaaataggttgtagaatagaaggtatgtatagtgtattatttgttggagagagaatttgaataattagtatatgaatagaaaaaaaatttggatagtaaaatgttaatagtggttatttttgggagatgagtggttttttattggtgtgttatatattattgtattgtttgaatttttataataataataaaagaataatatattatttttgtaataagaaaaaatgaagatataaaaataaatttaatgaatgatttgtttttagggggtggtttgagttggaagagttttagattgagtttggtatagtggtataaatatgggttttggtgttagatagttttgagtggggttttattgttttatttttgaggaaggtgagggggggtggtagggggttgtggaaaggggttgggttgggttgggttgtttgtagttttagtttaggaggttgagattttgagagggatttagagaaggtagatgtattttgaatttgttggaggataaggtgaggggtgttgatattggggttttatggaggttagatagtggttttagattttttgaatttatagttaggtagatgagtaatttttattgtattattgtagttgaagtagaggtgatttggagtggggtgtaggtaatgaggatgattgagaaagtagtaggttgtatagattgggagtagagattagtggagggaggaggggagaaaaatggggaattaggaatgttgggagggggatgaggaatataaggagggaggggaatattgagggggagtgaagatttagagaagagaattggggatgtagagagggattaaggaatattgaggggtagggtgtgtaaatgtaatatggaggaggatgtaagaaatgggaagaaggaattttggagtaaataggaaatgtgaggtaggaatagggagtagggagttaggttaagggaatatggaggggggtataaggaatgaggagtagggagtgggggaggggtagataggttgggatggaggttttttagggaggtggaaaggggtgggattatttttggtttagagaggggagggtagtttttgagttttggaggggtttggagtgagtggatgtatttgggaattgtaggaggatgaggtgagtagttgggttggtttttggatgagagttttgttaggggttggttttattttttgggatttggagaaaatttgttttaaggattggattgtattggatttatttggttgggaagggaggggattggatttggtttggttgggtttaagatggaattattagtttagtatttatttgaggagggggtgtaatagggaaggggtggaattaagatgtgtttgtttggaggggggtgtgttaggaagaagggtggggttaagagatattggattttgtagggtgtgagtaggggaggggttgggtttattagatattgtgataattttggaggaaggtttgttgggtagggggtgggattgaatggtattgtggatttggagaggggtgtgtgttggggtagagtgttagattgagattatgattattgtgtatgtgtattatgttttgttagaaaggggtgtgttgagaagggttagtattgagaagagttagttgttgaatgtgtatgtgtatggtggatattaaagaaagggtttgtgttgggaaagtgggtggggttgagagtggttttgtagttgatgtgtatgtgttttattgatttgtggttgggtggggggtgtattgggaaaaggggtggggtttttagagttgttgtgttggtatatttttttggagaaggggagggtgtggttgtagagaattgagatttagaagttttgaatttttgtatttgagaatggagttgttgggggtggtggagggggttggaattggggatttatggaaggtgaggattagtttttaggtataataggggagaggatgtttagtgggttttaatttgatttaggtttttttttttttaggtttagtttttgttaggttaaattgagatatgtttgatataagtgagagtggtgtaggtttaatttgtttttaggtaaggtttttttttgttttttttttagttgttttttttttttagtttttgttgttgtttttaagttttttggtttttttttttttatttttgtttttttttatttatttttttgtttgggtgtttttttgtttagtggagggagggagagaaggtgggtgggttttttttttgttattagtttttgtttagaggaaagggaggttttgttgggttgaggtggttagagtatattgtaggtaggagttagtataggttagagaagtgtggttttggaattttggagttatttgtttagttgggggtgaggagaaggtttatgaatttttttgtttttttttgtaggttgaagttttagaaaaggatagtagtttgatgatgtagattttgttgatagtgatttagaatgtggaggttttagagatattgaaggttttaaaggtattggaggttttagaggatgtgaaggttttaaaagtttttggggttttaaaggttatagaggttttaaagattttagaggtttgggaggtatttgttatttaggttttatttattatttagttgattgatatttaggttttggtagttgaaaataagagtttagtagttgatattaagaaatagaatgttgatttgtaggttgtgataatgtttgttattgagattaaaaaggttagttatgtggttgatataaaggttaatataaaggtttaggagattgaggttgtatttttttaggttttagtagatgaatttgagtttgagagtgtagttgtttagttttaggagaattaggatatttggtttaaggttaaagttaagaaagtttgaaaggtaagatttttgtagttattatttttggttttttattttttttttagttgatttatttgttttataaatatttagaaagatttttgtgtttattagggttgtggggggtattgagagtaatgtgatgtaatttttgtttttagagagtttgtagattgatggggaggtgtaatttgaatgtaatgtagtttatgtttatatagtagttgttttgtattaggttttgagttaagtatatttatgtaggttattttattaaattttgaaagtaatttttatagttttaattttatggagaaggaagttgagttttagagaggtgaagtggtttgtttaggatggtttaagtagagttagtagtgggtatagaaagagaagaagatttagtttttatttatttttggtttgtttttggtttgttaggtag

SEQ ID NO: 99 - DNA, 4001 bp, Artificial Sequence
  chemically treated genomic DNA (Homo sapiens)
ttgtttagtaggttaggagtaaattaagggtgggtggaggttgagtttttttttttttttgtgtttattattggttttgtttgaattattttagataagttgttttatttttttggaatttagtttttttttttataaaattggggttatgagaattatttttaagatttaatgagataatttgtataaatgtgtttagtttaaggtttaatatagggtagttattatgtaaatataaattgtattatatttagattgtatttttttattagtttgtaagttttttgaagataggaattatattatattatttttagtgttttttatagttttgatgagtatagggatttttttaaatgtttgtagaataaatgaattaattgagagaggagtagaaaattaagggtggtgattgtagaggttttattttttgggtttttttggttttgattttgggttgagtattttgatttttttgagattgggtagttgtatttttaggtttaggtttatttgttggggtttgagagggtgtagttttagttttttgagtttttgtattgatttttgtattagttatatggttgatttttttggttttagtggtaggtattgttatagtttgtgggttagtattttgttttttggtgttagttgttagatttttgtttttagttgttagaatttgggtattagttagttgagtagtagatgaggtttgggtggtaggtgttttttgagtttttggggtttttgagatttttgtggtttttgagattttagaggtttttgagatttttatattttttgagatttttagtgtttttgaggtttttggtgtttttgggatttttatattttgggttattgttaatagagtttgtattattgagttattgtttttttttgaagttttagtttgtaagaggaagtagggaagtttatagattttttttttatttttaattaagtaaatggttttaaaattttaaggttatatttttttgatttgtattgatttttatttgtggtgtgttttgattattttagtttaataaggttttttttttttttgagtaagaattgatggtagaagaggggtttgtttattttttttttttttttttattgggtagggggatatttaggtaggaaagtaggtggagaaggataaggatgggaggggaagagttaagggatttgggggtagtaataagggttggagaggaaaagtagttggggaaaggatagaaagaggttttatttggaagtgagttagatttgtattatttttgtttgtgttagatatgttttaatttggtttggtaagagttgagtttgaaggggagaaggtttgggttaagttgaagtttattgaatgtttttttttttgttgtgtttggaggttgatttttattttttgtaggtttttaattttaattttttttattatttttaatgattttgtttttagatataggaatttaaagtttttaagttttaattttttgtagttgtattttttttttttttaggaagatgtgttagtgtggtagttttgaggattttgtttttttttttagtgtattttttatttagttgtaggttgatagagtgtatgtgtgttggttgtagggttgtttttagttttgtttgtttttttagtatgagttttttttttgatgtttattgtgtatatgtgtatttagtagttggttttttttagtgttggttttttttaatatgtttttttttagtgaaatatagtgtgtatgtgtaatggttgtggttttagtttggtattttgttttaatatatgtttttttttaggtttgtagtattatttggttttgttttttgtttaataagtttttttttaaaattgttgtagtgtttggtggatttggttttttttttatttatgttttatagagtttagtgttttttggttttgtttttttttttaatatgtttttttttaaataggtgtattttggttttgttttttttttattatattttttttttaaataaatattgagttagtgattttattttgggtttggttaaattgggtttagttttttttttttttagttggatggatttggtatgatttggtttttaaggtaggttttttttagattttagagggtggggttgatttttagtggggtttttatttaaaagttgatttggttgtttattttgtttttttataatttttgagtgtgtttatttattttaagtttttttgaaatttggagattgtttttttttttttaggttggaagtggttttgtttttttttgtttttttagggggtttttgttttagtttgtttgttttttttttgttttttgttttttattttttatgtttttttttgtatttttttagtttggttttttattttttatttttattttatattttttatttattttagaattttttttttttattttttatatttttttttgtgttatgtttgtatattttgttttttagtattttttaatttttttttgtatttttgatttttttttttggatttttatttttttttagtgtttttttttttttttgtattttttgttttttttttaatatttttggttttttgtttttttttttttttttttttgttagtttttgtttttagtttgtatagtttattatttttttagttgtttttattgtttatattttattttaggttatttttgttttagttgtagtggtgtagtaagaattgtttatttgtttggttatgggtttgaggggtttggaattattgtttgatttttataaaattttaatattaatgttttttattttgttttttagtgagtttgggatgtgtttgttttttttaagttttttttgaagttttagttttttggattagagttgtagatagtttaatttagtttagtttttttttgtagttttttgttatttttttttgttttttttgggggtggggtaatggggttttgtttagggttgtttgatgttaaagtttatgtttatgttattgtattaggtttagtttgaagtttttttaatttaaattgttttttgaaagtaagttatttattgaatttatttttatatttttatttttttttattataaaggtaatatgttgtttttttgttgttgttgtaaaaatttaaataatgtagtaatatataatatattaatgaaaggttatttattttttagaaataattattattaatattttgttatttagattttttttttatttgtatattaattatttaggttttttttttgataaatggtatattatatatattttttgttttgtgatttgtttttttttagttatatataaaatatttttttgttagtgtatatttttttaaatagttgtatgatttttttttgtatagatgttttataatttattgaattagtttagtatatatgtatatttagattgtttggtgtattttttgttatttatggtattttttgttagtttaaatgttataaaaaagttttttattttgatgtaaaatttgttaatttatttttaaaaagtaaatggataatatttttgttagtaatgttttttttgtatatgttatatattataaatattttttatgttatttatgataatttttgttaaataaaaatgtttaattattatgtagttaaatatatttattttttttttattataattggattttgttgtttgtttaaagatgttttttatatttttataataaattttgtttttttttttaagtatttttgtggttttattatttatatttagatgtttgattattttaaaatttattttttatatggatttagtttgattattttttaaaattatagttttttatttttatattatgtgtaaattaatttattttttttttttttgttttgaaatggtatttttattatataataaatttatataattaattggatttgtttaagagaataaa

SEQ ID NO: 100 - DNA, 2501 bp, Artificial Sequence
  chemically treated genomic DNA (Homo sapiens)
aggaatatagttaaagattttgggaattaagatgaggatattttggaggggttattatttagtttattatggaagatattatgagagggagttaatataaaatgttttagaaatagagaaaggtagttaggtatagtagtttatgtttttaattttagtattttgggagggaggtgggtggattgtttgaggttaggggtttaagattagtttgattaatatggtgaaattttatttttattaaaaatataaaaattagttgggtatggtggtaggtgtttgtaattttagttatttgggaggttgaggtaggagaattatttgaatttaggaggtggaggttatagtgagttgagattatattattgtattttagtttgggtgataagtatgagattttattttaatttaataaaaaaaagaaaaaagaaaaaaaaaaaaaagaaatagagaaaagttggttaattttttatagtgggaaaaatgttttaggaaattatagtttttatattaaatatttaaatgagttaaaatttatttaattggtaattttagttttatttttttaaatatgtaaattatttaaatttttattaaattttttatattaggttagttaagttttaaaatgtttatatattttttaatagaaatttttaattattatttttattttttaaggaaatggttgtgtgtttttgattttgttttgatagaattgttagtggtttttgaattatggtatttaatttatggtatggttagtgagttataaagtgttttagtattaattaagtaaagttataaaagtagatttagtggataataaggaatattagttttagagttaaaaagatttgggttgggttttagttttgttatttattagttgtgtaatattggaaaagttattttttttttttaattttggtttttttatttgtgatatgatagtggttagaggattttatttatagaattattgtgatgataagagtagttaagggtaagtttttgtatagggtttttttggttattattgggttaataagatataattatatgttttatttttatttttaaaatttaaatagtttttaaaaataagttattgtagtttatttggaagaaaagattgatatgaattaatatgtaattatttataatttttttttattttttttattgtgaatatttgttgtggaaatattaatatgtttggtttttattggggtaggattttatatgtgtaggattttattggggtgttatatatatatatagtagatatgttttattatttttttaaaattggataattaaattttataatttatttagtttaaaggttttagagatggtagatttgtatttttatgagggtgaggatgagaatataatttggtttgttattatgtattaaggtatttgttgtttttatgaagatgtttgtagttagttagttagtttttataaattttatttttaattttgttatgtttttttttttggaattttttaaggggtttttagaatttgtatttagtttttataggttgagattagggtgatattttgggaaatttgtttagtgatagttaaggtgtagttttagatgaaaggtatataattttaaatataaaaaagttatttaggttaggtttagtggtttatgtgtgtaattttagtattttaagagattgaggtagatagattatttgaggttagaagtttaagattaggttggttaatatggtaaaattttgtttttataaaatatataaaaattaataggtatggtggtgtatatttgtaattttagttatttaggaggttgaggtataagaattgtttgaatttgggaagtagaggttgtagtgagttaagtttgtattattgtattttatttaggttgggtaatagagtgagattttattttaaataaataaataataaagttatttaattaaagaattgattattaagtagaagtataaagtttaggttttattaggtttttaattgtatattagtgattgtgaaaaagtaattatttttataattaaaatataaattataaaaaaatagatttaaagaaaagaaagatgatagagtgaaagaaggtatattttttttgtgtttaaattatggagtttataatatagtagtatatatagttgggtgttttgtggttttggtatttttggttttttttttatggggttgtttttgattagtagaaggttgaaaataaaggaaaatggagaaatgtttaaaagaaaattattggtttttttaagattattaaagttttttaatatgtttttagtaaagtgggggtatttgatgtgaaattttagaattaaaaattattggttgttattattgataattgagtttttattatagtttttaatttagatatgtttatttaatagatattttttttttttatggtttttgatttttgaatgatgtatattgaaagtaagtagtataat

SEQ ID NO: 101 - DNA, 2501 bp, Artificial Sequence
  chemically treated genomic DNA (Homo sapiens)
gttatgttatttgtttttagtatatattgtttagaggttagaagttataagggagagaaatatttattagataagtatgtttgagttgggggttgtggtgaggatttagttgttaatgatgataattagtaatttttggttttagaattttatattaaatgtttttattttattggaagtatattgaggaattttgataattttaaagaagttagtgatttttttttgaatatttttttatttttttttatttttagttttttattagttgaaagtggttttgtgaaggggaagttgagggtgttgagattataaagtgtttagttgtgtgtgttgttgtgttgtgaattttgtggtttgaatatgaaagaaatgtatttttttttattttgttattttttttttttttgagtttgtttttttatagtttgtattttaattatgggaataattgtttttttatagttattgatgtataattaaaaatttgatggaatttgggttttgtgtttttgtttgataattggttttttagttgaatggttttattatttatttatttgagatggagttttattttgttgtttagtttgaatgaagtgtagtggtgtaggtttggtttattgtaatttttgttttttaggtttaagtgatttttgtgttttagttttttgagtagttgggattataggtatgtattattatgtttgttaatttttatatattttgtagagatagggttttgttatgttggttagtttggttttgaatttttgattttaggtgatttgtttgttttagttttttaaagtgttgggattatatgtatgagttattgagtttagtttgaatggtttttttatatttaaagttgtgtgttttttatttggagttatattttggttattattaggtaggttttttaggatgttattttggttttagtttgtgagagttgaatataaattttaagggttttttggaaagttttagggaagggagtatagtgaggttgggggtggagtttgtagagattggttggttggttgtagatatttttatgagaatagtaggtattttggtgtatgataataggttaggttatatttttatttttgtttttataaagatataggtttattgtttttgaaatttttgggttagataagttgtgaaatttaattatttaattttaggaaggtggtaaggtatatttattatgtgtatgtgtagtattttagtggagttttatatatgtggagttttattttagtggagattaaatatgttaatatttttatagtaaatatttatagtaagagggatagagaaagattataggtagttgtatattggtttatattagtttttttttttaaatgagttataatgatttgtttttgagagttgtttgggttttggaagtggagataaggtatgtggttatgttttgttgatttaataatgattagggaggttttgtgtaaagatttatttttggttgtttttgttattatagtgattttatgagtgaggttttttagttattgttatgttataggtgaggaaattaaagttagaagaggaaggtaatttttttgatgttgtatagttggtaaatggtagagttgggatttaatttaggtttttttgattttaaaattaatgttttttattgtttattaaatttgtttttataattttgtttggttgatgttaggatattttgtagtttgttggttatgttatgaattgagtgttatggtttaaaggttattggtgattttgttagggtagggttaagggtatatagttatttttttaggaaatgggggtggtggttggaaatttttattaaagggtatataagtattttgagatttggttggtttggtgtagggggtttgatgggaatttaggtagtttgtatgtttaaaggaatgaggttgagattgttaattagatgggttttagtttatttgaatatttaatgtggaggttgtggttttttgggatattttttttattgtggagagttagttagtttttttttgttttttttttttttttttttttttttttttttttattaaattgagatgaagttttatgtttgttgtttaggttggagtgtaatggtgtgattttggtttattgtaatttttgttttttgggtttaagtgatttttttgttttagttttttgagtagttgggattataggtatttgttattatgtttagttaatttttgtatttttagtagagatggggttttattatgttggttaggttggttttgaatttttgattttaggtaatttatttgttttttttttaaaatgttgggattagaggtatgagttattgtgtttggttgtttttttttgtttttagagtattttgtattaatttttttttatgatattttttatggtaggttgaataatggtttttttaaagtgtttttattttaatttttagaatttttgattatgttttt

SEQ ID NO: 102 - DNA, 3501 bp, Artificial Sequence
  chemically treated genomic DNA (Homo sapiens)
ttgttttatatattttattatattggaataatttatgttttcggttttttggtttggtatttggatggtttgtcgtttatattttttttttttttattaattaggatcgttatcgttattattgtttgtcgttgatttcggatttgttttcggattttttggaggtatttgtaggttaaaaggagataacgtaagtatattaatattaataatgttagtgataataatgattttttaaggggtttgatttatttaaagggattaagattagataattgtttagttatgtttttaaaaatgtttgagttaggaatagtggataaatgagtttgtgaattttcgaaaatttgttttttaagttttgaaatatttaaggttaagttattattttaggtttttaaatgttttgagatatttttttagttatgttgatatttattataagtataaggtattatgtaataattagaagtattttaattattttgtaattgtatacggtgttttaaatttatattttttagttagattatattttggcggagattattaatttgattagttaatttttgattaatttgagtttgagaattttaaagtttggaggagtttttttgttatgttttaatttaatatattgaacggtttgaatagaattgtggatggtaattttagtagttgttgttgttgtagtaatcgtaattagttttgtaatgatggtaataagagtaaaaataaatttttttgtttttttgcggatatttttaagaattttattgattatgtgaatagagggggaagatttttatggacgatgtaaagaaattggtatttatattttttttttagtttttattaagagagtatttgtagtgggattaaaagtagtattaatgtacgtgaatagtttatagttattatattttatagtttgtgtattgggaatgataattatatttttaattaatagtatgtaagggggtttgatatagtttttgatgggtattattcgtttagatatgagggtgatgttgaatgtgggtgttttggtattagtgtgaaggagttgataggtagtgttttatatttttatttttgttatagttgtagttaatttttatagttgaggatgttttggggtaataaagggatgaattatttttggtttaggaggagtaatgtttgtatttatttatttaaataggtaaggggatatttattgttttagtttgtatgattgttatttattttttatataatttaataaataattaaattttgagtatgaggtatttttgttggagtaattttgttaataatgtttttttggagtttaattaataataatatttgcggttagattttggagtataacggttttaggagtattataattattttataaaattgaagttattataaaaggtttttttgtaggtttttttaattaaaagagaggttgggtatagttgtttatatttgtaaatttagtattttgggagatcgaggcgggtagattacgaggttaggagtttaaaattagtttggttaatatggtgaaatttttgttttagttttttgagtgttgggattataggtatgtgttattacgcgtagttaatttttgtatttttttagtagagacgaggttttattatgttgtttaggttggtttcgagtatttgattttaatttgaggtgatttaattattttagttttttaaagtgttgggattataagtatgagttatcgtattcgggttttagttattttagaatagtatgttgttttgtattcggagggtttttttgtaaatagtttattaatattgagcgtgtttggaaagatttggtttttaaataattggtttcgtttgtgtaaaacgagttttgttgtatgtattaaaaattattttggttgggcgtggtggtttacgtttttaattttagtattttgggaggttcgttttgttgttagggaggttgtaaaaggaggatgcggttatttttgtttttattatggaaggttgggattttataggtatagaaaggaaggagggagagatgggaatgtgattgttttttagatatagtttttggtaggatcggatgtgggagagtgagggttttattttagttggggtttatttaggtttatgttttggatatgttgagagtttttttggaaggtagggatatagtgtggtttaaaaatatataaatgtttttattggtttaggggttgttataatagattggaagggtgatatattttaggcgtttgttatttattatacgtattttttatttattggtatttttttattttaggtatatataaagttttagtttagagattaattttggatttagttttgaatttgtatattttgtgtgtagatttattttttataatttttgtttagtttagtttgtgtattatttttttttttttattaggggaggagttcgttttggtatttttattggtttgtagatttattttttttgggtagggttttaggatttaggataatatttgtgttttttgtttagaattttttaagtagatataatggtaagaatggtgtttgttttgttgtttttgttgttgtttttgggttttgttgttttttaggagaattaagatggtgagtggggaaagtaagggatgggtgttggagaggattggaaggaggtgaggaataggatatgtggttgggagataggttggatgtagttgggatattttggtatacggtaggaatgggtgtttaaggttgttaatttttttagtttatatatttttaggagtatttagggagtttttgcgttggttcgaaataagatttttaggaatttgaatttaaaatttttagtttatagtgaaaataaagattttaaagattaagcgatttgtttggggtagatagttaggacggagtaggaattatatgtttggagttgtttttgtttttgtttttttttttttttcgatggttgggtatatttgtttgacgttgatgaaaagagagagtagttttaaggggaaagtgggaaggtaggttggttggagggatggtgttagaaggaaattcgtgtttaaattttatatttagatattattgtagtgggtttggaaggcgagtggttggaagagaagagagtgggagtttcgggagattaagagttatttttaggataagggaaggaggttgtttgtggtatgagaatgtgtaggataaagatatggaagcgaatggttttttagttgtgtgagtttaaaatttatgatatttataaattgttagaaaaggtgttatatgtttgttatataataattattttggaatgttaatttgattttgtgttaaaatttgaattatttagggttttttagagaaatagaattaataggtggtatatatatatatatatatgtacgtatatatatatatatatattgtatatatatggatatatatatatataggaagagat

SEQ ID NO: 103 - DNA, 3501 bp, Artificial Sequence
  chemically treated genomic DNA (Homo sapiens)
atttttttttatgtgtgtgtgtatttatgtgtatatagtgtatgtatgtatgtgtacgtatatatatatgtatatgtgtattatttattagttttgtttttttggagaattttgagtaatttagattttggtatagaattagattaatattttaaagtgattgttatataataaatatataatattttttttgataatttgtaaatgttatgaattttaaatttatataattgagaagttattcgtttttatgtttttattttgtatatttttatgttataaatagttttttttttttattttaggagtgatttttgatttttcggagtttttattttttttttttttagttattcgttttttagatttattgtagtggtgtttgagtgtgggatttgggtacgggtttttttttagtattatttttttagttaatttgtttttttattttttttttggggttgttttttttttttattagcgttaggtaggtgtatttagttatcggaaggagggaaggaataggagtagaagtagttttaggtatatggtttttatttcgttttgattgtttattttaagtaggtcgtttggtttttggagtttttgtttttattgtaaattaggggttttagatttagatttttgaaggttttatttcgggttagcgtagaggttttttgaatgtttttggaagtgtgtgagttgagggagttgatagttttgggtatttatttttgtcgtatgttagggtattttagttgtatttagtttgttttttagttatatgttttgttttttatttttttttagttttttttagtatttattttttgttttttttatttattattttggtttttttgggggatagtaggatttagaagtagtagtagagatagtaggataggtattatttttattattgtgtttgtttggagggttttgggtaggaggtatagatattattttgggttttggggttttgtttaggggaggtgaatttataggttaatgggagtgttaggacgggttttttttttaatagagaaaaaaaaatgatatataagttaggttgggtagaggttatgaagaatgaatttatatataggatatgtaaatttagagttgagtttagagttgatttttggattgaggttttgtgtgtgtttggggtggaaggatgttagtgggtaggaggtgcgtgtgatgggtggtaagcgtttgggatgtgttatttttttagtttattgtgataatttttgggttagtaggggtatttgtgtgtttttggattatattgtatttttgttttttagaaaaatttttaatatgtttaagatatggatttgggtagattttagttggggtgggatttttatttttttatattcgattttgttagaggttgtgtttggaggatagttatatttttattttttttttttttttttttgtgtttgtggaattttagttttttatgatggaagtagaaatagtcgtattttttttttgtagtttttttggtaatagaacgagttttttaaaatgttgggattaaaggcgtgagttattacgtttagttaagataatttttaatgtatataataagattcgttttatatagacgaagttagttatttgaaaattaggtttttttaggtacgtttagtgttgatgggttatttgtagagagatttttcgaatataaagtaatatgttattttaaagtgattggggttcgggtgcggtgatttatgtttgtaattttagtattttgggaggttgaggtggttggattattttaggttgaggttaggtattcgagattagtttgggtaatatgatgaaatttcgtttttattgaaaaaatataagaattagttgcgcgtggtggtatatgtttataattttagtatttaggaagttgaggtaggggttttattatgttggttaagttggttttgaatttttgatttcgtgatttgttcgtttcggttttttaaagtgttgggtttataagtgtgagtaattgtgtttagttttttttttggttaaagaaatttataaagggattttttatagtgattttaattttatggaataattgtaatgtttttaaggtcgttgtgttttaaagtttagtcgtaggtattgttattgattgggttttaaaagggtattattggtaagattgttttagtaaaaatattttatgtttagagtttaattatttgttagattatgtagaggatggatggtagttatataggttgagataatgggtgtttttttatttatttaaatggatggatgtaggtattattttttttagattaaaaatgatttatttttttgttattttagaatatttttaattatgaaaattagttgtagttatgataggaataaggatatggaatattatttattaatttttttatattaatattaaaatatttatatttaatattatttttatatttgaacgggtgatatttattaggagttatgttaaatttttttatatgttgttggttggaaatataattattatttttaatatataaattatagaatgtgataattgtaagttgtttacgtgtattgatgttatttttaattttattataagtatttttttggtaagggttagggagggggtatggatattagtttttttatatcgtttatgggagttttttttttttatttatatagttaatgaagtttttaaaggtattcgtaaaagaataaagagatttatttttatttttattgttattattgtaggattaattgcggttattgtaatagtagtaattgttggagttgttatttataattttgtttaaatcgtttaatatgttgaattgaagtatggtagaaaaatttttttagattttggaatttttaggtttaaattgattaaaaattagttaattaaattaatgattttcgttaaagtgtaatttggttgggagatatgaatttggaatatcgtatgtaattatagagtgattggaatatttttgattattgtataatgttttatgtttataataaatattaatatagttgggaaaatgttttaagatatttaaaagtttgggatgataatttaattttggatattttaaaatttaaagagtaaattttcgaggatttataagtttatttatttattgtttttggtttagatatttttgaaggtataattaaataattatttgattttaatttttttaaatagattaaattttttggaggattattgttgttattggtattattaatattggtatgtttacgttgtttttttttagtttgtagatgtttttaaggagttcgaaaataaattcgaagttaacgataagtaatgatggcgatggcgattttagttaataaaaaggggggagatgtgggcggtaagttatttaggtgttaagttaagagatcgagggtatgagttgttttagtataataaaatatataaaataa

SEQ ID NO: 104 - DNA, 4701 bp, Artificial Sequence
  chemically treated genomic DNA (Homo sapiens)
tttatttcggttttttaaagtgtcgggattataggcgtgagttatcgtatttggtttaatttatttttttatgtagtttattgtgtatttattttttttagggaattttagttttataagggtagggtttttttgttattttggtttatggttatattatagagtttattttagtgtttggtatatattaaggaatgtattaggattttaaaattagttaggagcggtggtttatgtttgtaattttagtattttgggaggtcgaggcgagtggattacgaggataggagtttaagattagttcggttaagatggtgaaatttcgtttttattaaaaatataaaaaattagttgggcgtggttgtggatatttgtaattttatttattcgggaggttgaggtagagaattgtttgaattcgggaggtagaggttgtagtgagtcgagatcgcgttattgtattttggtttgggcgatagagtaagacgttattttaaaaaaaaaaaaaaaaaaaaaaaaagattataaagtttagaatgttataagattataggtggtgtagtgaatagggtattgttttgagagtttattatttttgggtaagttattaaatataggggtgggggtgggagttttttgtttgtaacgtggaggtgttacgtgttaagggtttaggtatacgcgcgcgtacgtataaatatatttattagtaaggatacgatttttggtattttaatgcgatttatatttttttatgaaggaatttattttttttttttattaattttagagataggtagagtcgataggtggaagaattgaggttcgagagagatagcgggggatttttttcgcgttacggtatagtagttgttcgattttttttttacgttcggggggcgcgacggttgtcgagggtcgcgggtagggggcgcggcgtcggggattatattttttaggagtagttgtcgcggtttcgtcgtttttggggttttaagagtttcgcgttaaagggggcgggggaggttgcgtagttcgttagttggaagatggttttgcgttcggtggggattcgagagtcgtttgtttgggtgtttaggcggggttcggttgtagtgaagaagttttttagttttgtagtgtttttgaggggaggcgaggcgaggcgaggcgaggcgaggttaagttaattggaggtcgttttttttcgttttgttcgtttcggtttcggtttttgcgtttaagttttagggaattttttttttttttttttaatttttcggaataggggaaggggcggtgaatttcgtcgtttggcgggagaaggggtgtttattagttggaagtttttgtaattcgaggtaatttttttttttaattttggttttagtttcgggaatttataggtcgttgggatgggcggggagaagggataggagagatataaaatgaaatgaacgtttaggtgttagggagttgagttttatagtatttcgtttttaatttatttttttaagtttcgggttttcgcggtaaaataggggtgatggggatagtgattaaaggtaggaggcgtaaaggatttagaaatcggtggggagtattgtgtaaattgtaaagcgttgtgtaaataaaattattgatcgtcgtgttattggatttatttagtttttaagatatgtacggatttggggcgggggatggggtgatatggttttgggtttttagggtggaatatttcggatacggggagggggggttatttgggtgcgtattaatttaattaggttttaatgggaattcgagttgtttttgaaaataattaaaataaagttattagaatgttgtgtttttaaatgacgaaatttaagagaaattgatattattaaaagacgaattttgattttttgaattaatttgattttttattgtttttttttttcgtttgtgttacggagataagtttagagagaaggtatttgatatcgagttttgcgtttttttttttttttttttttttaattatttggattaatttattttttggcgtgcgggggaaatttattaatttgttttggttttagagatttttaggtttagtaggagtttttttatatttacgtagttacgatttcgtttttaatattaaaattttcgaattttttttttttatttttttttagtagtttattgtgtttgtaaatagtttttggattatatcgggatgcgtttattattttgattagtaataaatttttatttttagggtattgtttaagtgaatagtgatcggtttttatgtttagggaataaaagcggggttgtgggagaggggtttagggagtaaacgtcgtagaattttagtttagggtcgttgttaagcggattcggtacgtgagtaggaggtcggtcgtagataaggggttttagggtttttgaggttttttttgttggtttttgggtttttaaagtttttcgagttttagaattttttatagatagtggcgtttcgtgttcgtttcgtttatatttgttaagtagtacgggaaaatttgtgtgtattttaataaagatatcgtatttttttagtaaaatggcggtggtcgcggttacggttttttaaataattttatatttttcgaggataggttataatttaagggatataatttttttttcgatttttattttagcgtttcgtttttttaagtttttaaagtatttagggtttttttttattataggggtttttcggatcgtttttggttagagtttttggggtagtttttttattgtggatcgttttttttcgtttttatattgtttttaaggagttttgggacggggattgaatttttaggttgggttttacggatggggggtagcgagttttgtttttgatattttaaaatttttaggttaagagaagtatataaatgaattttcgattagggtatatgggagatgtaggggtttttgaggagaagaggttattcgggaggttttttttattttttagagggttcgggtagtattgggggttcggttttaggagggaattttaaggtagaggtcggggggcgcgttgggggagagacggtagaggagggggaagggataaagtttgaaagtatttttttaatttttttagggaaagtttttttgggggttttatggatagagggggtagaggtgtggagggatcggtggcggggtgattttcgagaggtgatcggatttcgggggagcgattttttttttttgtttcggttcggttcggttgggagtcgtttagttcggggtcgcgtgtgttagttggggtcgtttttcggtagttttatcgggttaggggatttcgtagcgggtcgggagtagagttttcggtagttttaggggagagttttgttacggggggtttttcgtatcgaggttttttagtttcgtagagttagtttttcgtaaaggggaaatgtgtcggtatattagcggttttcggcgtcgtttggggtgcgtggcgggcgcggggggcggcggtcgggttagcgggtcgttcggcggggaagtttagggagttaggtagcggtttagggcggcggcggggagtaggaaggttcgggtcggggggaaaggtcggatttgttcggcggaagaaatatagatggcggcggcgtagcgttatttcgggtcgggagtaggtagttagtagttttgtttttatcgcggttcgttcgtcgtcgttaaatattcggatgcgtcgtttaagcgttagacgcggagttgggaaaagggaggtagaggaggcggaggtagaggtagaggtagaggtagagttcgagttcggtgtcgagattaagcgatagatcggcggggttgggtttcgtaaagtcggttcggcgagttttttcgatattcgagtcggggaggaaaagtagcgatttttcgttcgtattttcgggagtcgtattttagattggttcggtagttaggggtttaggagtagatttcgaggtaggttttgtttagttttcgacgagggttggttttttggaaggcgtttttaatagtcggattagataggttattatgatcgagaattttacgttcgtttttgcggttaagtttaagcgggttaaggtttttaagaagtttatagattattttaagtatttagatatgatcgtggttgttatttaggtcgagaagaatcgcgttggtttttcgcgttagtttatttagaagtatattaagagttattataaggtgggtgagaacgttgattcgtagattaagttgtttattaagcgtttggttattatcggtgtttttaagtagattaaaggggtgggggtttcggggttttttcggttagttaagagcgacgaatttaagaagttagtggtttttaagaagattaagaaggaaattaagaaggtagttacgttaaagaaggtatttaagtttaagaaggttgtttttaaagttttaattaagaaatttaaagttatttcggttaagaaggttaagaagaagttggttgttacgtttaagaaagttaaaaaatttaagattgttaaagttaagtcggttaaggtatttaagtttaaaaaggttaaattagtgaaatttaaagtaaagtttagtgttaagagggtcggtaagaagaagtgataatgaagtttttttttgcggatattttttttt

SEQ ID NO: 105 - DNA, 4701 bp, Artificial Sequence
  chemically treated genomic DNA (Homo sapiens)
aggagggagtgttcgtaagaaaagattttattgttatttttttttgtcggtttttttggtattggattttgttttgggttttattggtttggtttttttgggtttggatgttttgatcggtttggttttgatagttttgggttttttggtttttttgggcgtggtagttagtttttttttggtttttttgatcggggtggttttgggttttttggttggggttttggaggtagtttttttgggtttggatgttttttttggcgtggttatttttttgattttttttttggtttttttgaaggttattgattttttgggttcgtcgtttttggttagtcggaaggatttcgaggtttttatttttttggtttgtttgaggatatcggtggtgattaggcgtttgatggataatttgatttgcgagttagcgtttttatttattttgtagtggtttttgatatatttttgaatggattggcgcgaggagttagcgcggtttttttcggtttggatggtagttacgattatgtttgaatatttggggtggtttgtggattttttggaggttttggttcgtttgggtttggtcgtaggggcggacgtggaattttcggttatggtggtttgtttggttcggttgttgaaggcgttttttaaagggttagttttcgtcggaggttgagtaaagtttgtttcgggatttgtttttgagtttttgattatcgggttagtttggagtgcggttttcggggatgcgagcgaggagtcgttgtttttttttttcggttcgggtgtcgggagagttcgtcgagtcggttttgcgaggtttagtttcgtcggtttgtcgtttggtttcggtatcgggttcgggttttgtttttgtttttgtttttgttttcgttttttttgtttttttttttttagtttcgcgtttggcgtttgggcggcgtattcgggtatttagcggcggcgggcggatcgcggtgaggatagggttgttggttgtttgttttcggttcggaatggcgttgcgtcgtcgttatttgtgtttttttcgtcgagtaaattcgattttttttttcggttcgggtttttttgtttttcgtcgtcgttttgggtcgttgtttggttttttgggttttttcgtcgggcggttcgttggttcggtcgtcgtttttcgcgttcgttacgtattttaaacggcgtcgaggatcgttggtgtgtcggtatattttttttttgcggggggttggttttgcggggttagggagtttcggtgcgggaaatttttcgtagtaaagtttttttttgaggttatcgggggttttgttttcggttcgttgcggggttttttagttcggtggagttgtcggaaagcggttttaattaatatacgcggtttcgagttgggcgatttttagtcgggtcgagtcgggataggggggaggggtcgttttttcggggttcggttatttttcgggggttatttcgttatcggtttttttatatttttattttttttgtttatggggtttttaaggaaattttttttgaaagagttggaagggtatttttaaattttgtttttttttttttttttgtcgttttttttttagcgcgtttttcgatttttgttttgaggtttttttttgaggtcgaatttttagtgttgttcggattttttgagagatgaggagggtttttcgggtggttttttttttttaaagatttttatattttttatatattttaatcgggaatttatttgtgtgttttttttagtttggaagttttggggtgttagagatagaattcgttgttttttattcgtgaggtttagtttgggggtttagttttcgttttaaggttttttgaaggtaatgtgggggcgggggagggcggtttataatggagaagttgttttagaagttttaattagggacggttcggggggtttttgtaatgaggagaggttttgagtgttttggggatttgggaaagcggggcgttagggtagaggtcgaggagggggttatgttttttgggttgtgatttgttttcggaaagtgtggagttgtttagagagtcgtggtcgcgattatcgttattttgttgggaagatgcgatgtttttgttaaaatgtatatagattttttcgtgttgtttggtaggtgtagacgaggcggatacggggcgttattgtttgtagggagttttgaagttcgaggggttttaggggtttagaggttagtaggagagattttagagattttaggattttttgtttgcggtcgattttttatttacgtgtcgggttcgtttggtagcggttttgggttgagattttgcgacgtttgttttttgggttttttttttataatttcgtttttattttttaagtatagaggtcggttattgtttatttaaataatattttgggagtgggagtttgttgttggttaaaatgatgaacgtatttcggtatggtttaagagttgtttgtagatatagtgggttattggggaggggtaaaggggaggggttcgagggttttgatgttggggacgggatcgtagttgcgtgggtgtgggagggtttttattggatttgggagtttttgaagttaggataaattaatgggtttttttcgtacgttaagggatggattaatttaaatgattaggggaggaagggggagggggagcgtaagattcggtgttagatgttttttttttgggtttattttcgtggtataggcggggaagggaagtaatggggggttaggttagtttaaaaggttaaggttcgttttttgatggtgttaattttttttaagtttcgttatttgaaaatataatattttggtggttttgttttggttatttttaaagataattcgggtttttattaagatttggttgggttaatacgtatttaaatagtttttttttttcgtattcgagatgttttattttgagagtttagaattatgttattttatttttcgttttagattcgtgtatgttttaaagattggatgaatttaatgatacgacgattaataattttatttgtatagcgttttatagtttgtatagtgttttttatcggtttttggattttttgcgttttttgtttttgattattatttttattatttttattttatcgcggaggttcgggatttagaaggatggattgggggcggggtattgtaaggtttagttttttgatatttgggcgtttattttattttgtattttttttgtttttttttttcgtttattttagcgatttgtaaattttcggaattgaagttagaattggggaaaggggttgtttcgggttgtaggggtttttagttagtggatattttttttttcgttaggcggcgaggtttatcgtttttttttttgtttcggggagttggaggggaagggagggggttttttggggtttgggcgtagaggtcgaagtcgaggcgggtaagacgaggaaagacggtttttaattggtttggtttcgtttcgtttcgtttcgtttcgtttttttttagggatattgtagagttggggggtttttttattgtagtcggatttcgtttgggtatttaggtaggcggttttcgggtttttatcgggcgtagagttattttttagttggcggattgcgtaatttttttcgttttttttaacgcgaggtttttgaaattttaggaacggcggaatcgcggtaattgtttttgggaaatgtagttttcggcgtcgcgttttttgttcgcgattttcggtagtcgtcgcgtttttcgggcgtgaggagggggtcggatagttgttgtgtcgtggcgcggggagggtttttcgttgtttttttcgggttttagtttttttatttgtcggttttatttgtttttggggttagtgagagggggaaatgaatttttttatggaaaagtataaatcgtattagaatgttaggggtcgtgtttttattaatgggtgtgtttgtgcgtgcgcgcgcgtgtgtttgagtttttggtacgtgatatttttacgttatagataggaggtttttatttttatttttatgtttaatgatttgtttagggatgatagatttttaaggtaatgttttgtttattgtattatttgtggttttgtggtattttgggttttgtaatttttttttttttttttttttttttttgagatggcgttttgttttgtcgtttaggttagagtgtagtggcgcgatttcggtttattgtaatttttgtttttcgggtttaagtaattttttgttttagtttttcgaatagataggattataggtgtttataattacgtttaattaattttttgtatttttagtagagacggggttttattattttggtcggattggttttgaatttttattttcgtgatttattcgtttcggttttttaaagtgttgggattataggtatgagttatcgtttttggttggttttggaattttaatgtattttttaatatgtgttaggtattgggatgggttttgtgatatggttataaattaaagtgataagagagttttgtttttgtggagttgaggttttttggaaaagatagatatataatagattatataaagaagtaaattaggttaggtgcggtggtttacgtttgtaatttcggtattttgggaggtcgaagtggg

SEQ ID NO: 106 - DNA, 2501 bp, Artificial Sequence
  chemically treated genomic DNA (Homo sapiens)
attttatagaaaagatataagtgtaagtattatggatttaagaattattttttaataaatgtttaagagataattatatttatttaggggaaaatgttatatgtttgagaatggattatggatgggtttaattagatgagagaggtatttagggagttgttttgagttatgaggttgaggagaaaattttttttttaattgaattttattgtttacgtattttttaaaatattatttggatatgtgggttttattttttgttttgtagttaggtagtttgttgagttatttttttggatttttataaatatttttatttttgtttatagtattattttcgtgttattattataagttttttttttttttttagatgtttataaagaaaggatgaggtaaagtttaatggatttacggtttttattgatttaagatggttatttgaaattattagaataaaattttttgatgaattttttttttaaaataaaattgaaaataaatggaaaagaaatatgaaatgtatgagagtttgagggagggattttaaagtgtttattgtttatttagtataatatatggttaaatttaataatgttttttttttttttgttttttttggttttttttaagtagaagaaagtatttaatattagaagtttttattttttataatagagttagggatatgtttttttttttagtttatatttggagtttaataataattataagtttaagatagtatttttagggatagaaatgttttttttaataagaagtataattaaatttttttatagatttaaaaattaaaagtaaatgaaattatatttatatttgttgttgattattttgtttgttagatttttgtttaaaataatgtttgattaaaaatggtattagggttttaatggcgagatatttttttagttattttgtagtaatttttttgtttattggtgtgaatttttattttattattttttttttttttttaaaagagaaattttgaaatttgagatttttataaatattaaagagtttattttgtaaataatttgttttttttaatatatttattattttttggtttttaaattaaagtttttttttagtgttacgtagatttaggttaatggttgaatttataatcgtgtttttaatttttgtaagtattgggttattgttgtgggtttgtatttttattttattaatatgttggtgggttatttggatagttttttgtgtaaattgaatattttttaattatattagtgtttttttggtattaattttttttatttttttaatgaaaaacgattattatatatatttattttaaatatagagattttagttagaattgtttatttggaagtcgtaatatttttttttatgtagcgatattttagagataaaagtttaagtggatttgaagattcgaagtggaaaataatttgtattggtaaagttgaataatgaagttataatttatgtttagttattttttgataatgggtagagtgatttattgtgttttttacgaagtttgagtttttgaaattgtagggtattttatatggttatgataatgatgtttgtgggaaaaggaatagtagttttgaaatatttataattaatataattttgattaaataaagaattttggtttttaatagttttgattattaaaaaagtttaaatttgtatagtaattattttaaaaataattatttaatgttttataattaaattgtatataatttagttttgggatatagaagttagtgaggtgagtttggagtagtttggtgtagttttaggagttaggagttgagtttttattggtttttttttttttgttattttgtttatttaagtttttggatagttggtataatttggttttgttgatgagtggatttgtattgggaagagagagtagtttgatttttatttttttttgtttttttttttttatttagtcggattttttaaagtcgtttaatgtttcggtattttttttttaaaatagagatttggtttttaaagaggacggggtcgagttttatttgagagtggattagcggtatgtagttaaattagttggtaaacgtatttatgtagttttgtcgttgggtaaagtggttagggttagtttaacgggaagttcgagaagtttagggagaaggagagaaataaggataatgatgagagaagtgtaaggtgagatggaaatattgtagaaaatggagttaggtaaatgagtaagtagtaaagtttggggtttggttcggttattaagttttattatttatgtatttgttgaaaatgtaatcgttgatattggttttttttaaggtatgttacgttttttagtgttaaaaatataaaaataaagatttatgttgattttaattttttaaaatttattgattaattttttggttagtttacgatttagtaattgaaattcgattattatagtgatttaattt

SEQ ID NO: 107 - DNA, 2501 bp, Artificial Sequence
  chemically treated genomic DNA (Homo sapiens)
agattgagttattgtagtagtcgagttttagttgttaagtcgtggattgattagagaattagttaataaattttagagaattaaagttaatatgaatttttgtttttgtgtttttaatattgaggaacgtagtatattttgggaaaaattaatattagcgattgtatttttagtaggtgtatagatggtgagatttggtggtcgggttagattttaagttttgttgtttgtttatttgtttgattttattttttgtaatgtttttattttattttgtattttttttattattatttttgtttttttttttttttttagatttttcgggtttttcgttgggttgattttgattattttgtttagcgatagagttgtatgaatacgtttgttagttggtttggttatatgtcgttgatttatttttagatgaggttcgatttcgttttttttaaagattaggtttttattttgaggaagaaatatcgagatattgagcgattttgaggaattcggttgagtgggggaggggaagtaagaagggatgggggttaagttgttttttttttttagtgtagatttatttattagtagagttagattgtgttaattatttaaaaatttagatgagtagaatgataaaaaaaaaaaggttaatgagaatttaatttttggtttttgggattgtattagattgttttaaatttattttattggtttttgtgttttaagattaggttgtgtatagtttaattatggaatattaaataattatttttgaaatgattgttatgtaggtttaaatttttttaatgattaaaattattaaaaattagagttttttgtttaattaaaattgtgttggttgtgaatattttaaagttgttatttttttttttatagatattattgttatggttatgtagggtgttttgtagttttaaaagtttaaatttcgtggaaaatataataagttattttatttattattaagaaataattgagtataagttgtaattttattatttaattttgttagtgtaaattgttttttatttcgaatttttaaatttatttgaatttttatttttaaaatgtcgttgtatgaaagaaagtattacgatttttaggtaggtagttttaattgaaatttttatgtttgagatagatatatatgataatcgttttttattgggggggtggggggaattagtattaagaaaatattagtataattaagaaatgtttagtttgtataaagaattatttagataatttattagtatgttagtgagatggaaatatagatttataatagtaatttaatatttgtaggggttgggggtacggttatagatttaattattgatttaagtttgcgtagtattgggaagaggttttggtttagaagttaaggaataatgagtatattggggagaatagattatttataagatgaattttttaatgtttgtgagaattttaagttttagagttttttttttgagaaagaaaaaggggtaataaggtagaaatttatattaatgaataagaggattgttgtaaagtaattgaggagatgtttcgttattgggattttaatgttatttttggttaaatattgttttgagtaagaatttggtaaataaaataattaataataaatgtgaatatagttttatttatttttaatttttaaatttgtggaaaagtttagttgtgttttttgttaaaaagaatatttttatttttgaaaatgttattttgggtttatgattattgttaaattttaagtataaattgaaaaaaaaaatatatttttaattttgttatgaaaaatggagatttttgatattaaatgtttttttttatttggaagaggttagagaaaatagggaagagaaagatattattgagtttgattatgtattatgttgaataaataataagtattttagagttttttttttaaatttttatatattttatattttttttttatttatttttagttttgttttagaagaaaagtttattagagaattttgttttgataattttaagtggttattttaggttagtggaaatcgtaagtttattggattttattttattttttttttgtagatatttgggagaggaagaggagtttgtaatgatagtacggggatggtgttgtaaataggagtgaaagtgtttgtggaagtttagagaagtgatttaataggttatttagttgtagaataaggagtagagtttatatatttagatggtgttttgagaggtgcgtagatagtgaaatttaattaaagagaggattttttttttagttttatgatttagaatagttttttaaatattttttttatttaattggatttatttatagtttatttttaaatatgtgatatttttttttaagtagatgtgattattttttaggtatttgttgaaaaataatttttaggtttatggtgtttgtatttgtgttttttttataaaat

SEQ ID NO: 108 - DNA, 4001 bp, Artificial Sequence
  chemically treated genomic DNA (Homo sapiens)
ataaaattgtgatagttattataggttttttaaagttatgttttatgtgattaaaaattatattttttttatttttttattatggttaataatattatgatatatatgaaaaagttttagtaatttttttttttaatagtgtttaaatattttattattatttttttttgatattttaaaattaaaattttgttacgttttgttatttgatgttgttatatttagttttttattttggaatttttagtatttttttaattagttaatatttatataatgtagtttttgtttatttatttgtttatatttttagggatataggatttttattaatatattttaaattgttttgtattaggattttatttttttttttttatgaggtaatattggttaattatttttttttagaatgttgattgttagttgaaggttgagttttagggattttttttaaatagaatttgagtaattagtgtatagttatatatggagtataatgttagttatgtagtgataattatagggaatattttttaaattaggatatggaatgttttttgaattgttaagaaagaaatgttatttttaatgtatttttgtaattaaatgtatttttattgataatttaggtattaagtagaatattttattaattagggtattttagttttagttttatagaaaataatttgttatatgtgattttatttgttagagtgtaaagagatgttattgatcgttagatgtttaaaagttagttttttggatggttttattgatattatatttttttatttttaggataatattgatatataaattaatattttattttaatattttaatttggagaaaataagattatatatttttgtgaaaagaagagatggtattgaaattgagagggtttatagagatattttttattggaatagtattttttattggaaaataaagtaagaatagtaaaaatttatatttttattttttatttatttatatgaataaaaaaagaattagataattaggtttttttttgtatatttttttttgttgtaaaaaaaaattgaatattttgtggattttgaaaatgttatttgatgaagaggttaatttttttatatagaaaaaaataatatagattgtttgttttttttattggagtgagaaattttaaatagttaaagtataagtatatttttttttttgaggttattgaaaggttaattaaagatgtgttttttatgaaaggtattattgggagatttttttttttaaagggatatttaaaaaaagttaatagataaagattttggtagagtattaggaatagttattatatggataatgaattatgaaataaaaatcgtttttagagaaatgtgtaggtcgggtacggtggtttacgtttgtaattttagtattttgggaggtcgaggcgggtagattataaggttaggagatcgagattattttggttagtacggtgaaattttatttttattaaaaatataaaaaattagtcgggcgtggcggtatgtgtttgtagttttagttgttggggaggttgaggtaggagaatggtgtgaatttgggaggcggagtttgtaatgagttaagatcgcgttattgtattttagtttgggtaatagaataagatttcgttttaaaaaaaaaatgtgttatgtattgataggtataagtaaagtatgtagtatataagaaagatatatatataatatatgtatgatttattaaataatttttgttaaattagtttttttaagatgtgtagttgtaatattaatatattttttttttattataaatatattttattttaattagattggtttttaaataggtatgagaataatatttttttttgatatggtttggttgtgtttttatttaaattttattttgatttggagtttttataatttttttgtgttacgggagggatttggtgggaggtaattgaattatgggggtgggttttttatatgttgtttttgtgatagtgagtaagtttttgatttgatggttttataaagggtagtttttttgtatatatttttttgtttgttgttatataagacgtgtttttgttttttttttattttttgttatgattgtgaggtttttttagttatgtggatttgagtttattaaatttttttttttttataaattatttaattttatgttgtttttgttagttttgtgagaatggattaatatatttttttttatttttttagagatattttagttttatttttggttaattttaaatagattgagttatgtttttaatgttattagttaggtgattgatttatgaataagtatttatattaaagagtaattatttatatttttagtaatattttgttttaaaaagggatttggaggttttttaaacggatatttttttgacgtatttatttgttttgtaagtttgttttatgtatttatttttaaatatagggtatgtttgttttgtgatgattaatttggtgatgttagaggtttaatattttaatatttttaacggatgaaatatggtatagaatttagagaaagttataagttatagatgggtttaaaaataaggaagtattatttttttatatgtggttaatattttttagttaattaagtttaagtatagttgttatataattaaagaataggggattataagggtttttaaaatataaagtagtttagagtttaagtttaattttgtttttagtagtttttggtggtgtgttttttttttgtttttgagttttaagttaaattttggttagtgagttagagtatagttttgtttttatttgtttttatttagaggtatttttttttttatttttgtttattgtaaaggttaattttaaaaatgattataaattaatggtttatgttttgtaaatatttattaattaagtttataatataagataagtgtttggatttgtttatagaaatatttattgtaaaattatatttagtatttttttgtacgttatttattgttaggtttttttagagtttaattagagttaattttttttttttgtttatattaaatatagtttgttagagtgggaagaaaaaggataatgataatttttattaaaataattattatatggtataaaatagaaataatttcgtaagttcgacgaggtcgggtgtggtggtttaggtttataattttagtattttggtaggtttaggtgggtggattataaggttaggagatcgagattattttggttaatacggtgaaatttcgtttttattaaaaatataaaaaaaaaaaattagttgggtatggtggtaggtatttgtagttttagttatttgggaggttgaggtaggagaatggcgtgaattcgagaggcggagtttgtagtgagtcgagattacgttattgtattttagtttggacgatagagttagattttgttttaaaaaaaaaaaaaaaaggaaatataagatttaggataaaagaaaaattagtagtgaaaaaatgttaattgtaattatgatattttggtgaggataaatgttaattttttaattagtaattagttgtggaatagtgttgatgttagaaaataaatgagtattgattatggatggtatttgttattattgtaattagttttttaaaaattattttttttttgttaagtttaatatttttggttaaaggttaattagtgattaataatgatttgaataaagaaaggaatgaagaaagagggagagagaaagggaatatttggaaggtgaaagtatatgaatgataggaaaaaagtttataaatgatattgggtaaagaattataggaaatagaagaaggtgttttgaagtgtttaggagtaattataagaggatagttattttggttttgaaagatatgtaagtaattgtttaaaatattttttttaagttttgtaaaatatatagttttaaaaaga

SEQ ID NO: 109 - DNA, 4001 bp, Artificial Sequence
  chemically treated genomic DNA (Homo sapiens)
tttttttgagattatatgttttataggatttaaggagaatattttaaatagttatttgtatgttttttaggattagggtagttatttttttataattatttttagatattttagagtatttttttttgttttttgtaattttttatttaatattatttataaattttttttttgttatttatgtgtttttattttttaaatattttttttttttttttttttttttttatttttttttttgtttaaattattattaattattaattgatttttgattaaaagtgttagatttaataaaagggaggtagtttttaaaaaattggttgtagtagtaataaatgttatttatggttaatgtttatttattttttggtattaatattgttttataattaattgttgattagggagttggtatttatttttattaaaatattatagttatagttgatatttttttattgttgattttttttttgttttgggttttgtgtttttttttttttttttttttgagatagagtttggttttgtcgtttaggttggagtgtagtggcgtgatttcggtttattgtaagtttcgtttttcgggtttacgttatttttttgttttagttttttaagtagttgggattataggtgtttgttattatgtttagttaattttttttttttgtatttttagtagagacggggttttatcgtgttagttaggatggtttcgattttttgattttgtgatttatttatttaagtttattaaaatgttgggattataggtttgagttattatattcgatttcgtcgaatttgcgaggttatttttgttttgtgttatataataattattttgatggaaattgttattgttttttttttttttattttgataggttgtgtttgatgtggataagaagaaagggttgattttgattgagttttgggaaggtttgatagtggatgacgtatagaagagtattgggtgtgattttgtagtaagtatttttgtgaataaatttagatatttgttttatattataggtttgattaatgggtgtttgtaggatatgaattattaatttgtgattatttttggagttgatttttatagtgaataggagtagaaggaagggtgtttttagatgagagtaggtgggaatagagttgtgttttgatttattggttaaggtttggtttaggatttagaagtaggaaggggatatattattaggagttgttagaaataaggttgagtttgagttttaagttattttatgttttgaaggtttttgtaattttttgttttttggttatatggtagttgtgtttgaatttgattaattgaaaaatgttagttatatatggagaaatgatatttttttatttttaaatttatttatgatttatgattttttttaaattttatgttatattttattcgttgaaaatattaaaatgttgggtttttgatattattaggttagttattataaaatagatatgttttgtatttgaagataagtatataaaatagatttataaagtagataaatacgttaggggagtattcgtttaagaaatttttaaatttttttttaaaatagaatattattgagaatataaataattgttttttaatataagtgtttatttataaattaattatttagttaatggtattgaaagtatggtttagtttatttgaagttaattaaaagtaaaattaaaatgtttttgaagaaatgaaggaaagtgtattagtttatttttatagagttaataaagatagtataagattgggtagtttatagagaaaaagaggtttgatggatttaggtttatatggttggggaggttttataattatggtagaaggtgaaggagaagtaaaggtacgttttatgtggtagtaagtaagagagtgtgtgtagggaaattgttttttataaaattattagattaaagatttatttattattataagaatagtatgtgaaaaatttatttttatgatttagttattttttattaggtttttttcgtgatataaggggattatgggagttttaaattaagatgagatttgggtggggatatagttaaattatattagaaagggatattatttttatatttatttaagaattaatttaattaaaatgaaatatatttataatgagaagaaaatatgttaatgttatagttatatattttggagaaattaatttaataaaagttatttgataagttatatatatattgtatgtatgttttttttgtgtattatatgttttgtttgtatttattagtgtataatatattttttttttaagacggagttttgttttgttgtttaggttggagtgtagtggcgcgattttggtttattgtaagtttcgttttttaggtttatattatttttttgttttagtttttttagtagttgggattataggtatatgtcgttacgttcggttaattttttgtatttttagtagagatggggttttatcgtgttagttaggatggtttcgattttttgattttgtgatttgttcgtttcggttttttaaagtgttgggattataggcgtgagttatcgtgttcggtttatatatttttttaaaaacgatttttgttttatagtttattatttatataataattgtttttggtattttattaaggtttttgtttattaattttttttgaatgtttttttggaaaaagaagttttttagtaatattttttatgaaaagtatatttttaattagttttttaataattttaaggggaaggatatgtttatattttaattatttaggattttttattttagtgagaaaagtaaataatttgtattatttttttttatgtggaagaattaatttttttattagataatatttttaagatttatagaatgtttagtttttttttgtagtaaaagagaatgtataaaggaagatttggttatttagttttttttttatttatgtgggtaaataaggaatgaaaatatgagtttttattgtttttgttttgttttttaataaaaggtgttgttttaatggaaaatatttttgtagatttttttaattttagtattattttttttttttatagggatatgtaattttgttttttttaaattaggatgttgagatgaaatgttaatttgtatgttaatgttgttttgagaatgaaaaggtatggtattaatggaattatttagaggattagtttttgagtatttgacgattaatggtatttttttatattttgatagatgaaattatatataataggttgttttttgtaaggttagagttggagtgttttaattaataaaatgttttatttaatatttggattattaataaggatatatttaattataaaagtatattgaagatagtattttttttttgataatttagaagatattttatgttttaatttagaaaatattttttgtggttattattgtatagttagtattgtattttatatgtgattatatattagttgtttaagttttgtttgagaaaagtttttagaatttagtttttaattggtagttaatattttagaagggaatgattggttagtgttgttttataaagaaaaaaaggtaaaattttagtgtaaaataatttaaaatgtgttggtaaaagttttgtatttttaaggatatgggtaagtgaatgggtaaaagttatattatgtggatattagttggttgggaaaatattgggaattttaaagtaaaagattaaatatgatagtattagataataggacgtgataaaattttggttttaggatattaaaaaagaatgatagtgaaatatttgggtattgttaaaaaaaagaattattaagatttttttatatatattatagtgttattagttataataaaaaagtggaaaaaatatgatttttaattatatgaaatataattttaaaaaatttgtaatgattgttatagttttgt

SEQ ID NO: 110 - DNA, 2501 bp, Artificial Sequence
  chemically treated genomic DNA (Homo sapiens)
gtttaagtttttttttttggatatttttagttttaaagaatagttataaggttatttattggttgaggaagttattggagaatgggagtttcggaatttggttgtcgagtgatagtatttttgaattatgcgttttttgtttgttttagttttttttttattttttattttagggaggatgtagggattggttagaatggaggaagagttggaaagattcgtgggttttagttttttattgtaggttgaaggtgggtagcggagtatatagttttgttttttttaaagtatggttagtttagattgattttttttatttggtttttaaagtttagtatttttttaaagttatttattttttttggttttgcggtttggattaagtttatttttattttgtaatttatttttttatttttttttttttttttttaaattttagaaaatatatatggtggggaagttaaggaaatttttattggtttttttttttttttgttgttttgtgttaaagttagaatggaatagttagttttttttttttttagttttttgtttttttttatatcgattttggtcggaattatttattttattgtttttttgtatttaaatttttttgttattatttttttttgttattttttattttagttttttttttgttttgttagtatggagagtgagggaggtttttaaaaatgtatattttgtttagatgaaaggaaaaggttggggtgggattggtggatttatcgtggatttgttgggtttatgtggtgtggtgttcggagattgtgattttttgagggtttaaagattaaaatgggatggattgaggcgcgtgttgtgtgtattacggagggttggtttttgtttggttcggtgggtgtagatgaatatacgtggggaattattgttaaatttagtattgtgttttataaaaaagttgagtttattgtttacgggaaattttgtttcgaggtaggtaaaaatgttattacgggttgtattaggagaatatgggtttttttagtttttttagaatgaggaagttttttaatgtttttataggaattattttgaaaagttaatgtaaatttttgaaagaaaggaagaaagaaaaaaataaagaaaaagaatagatttatatgtttatatatgattatatggagttttgtagataaatacgagtttattttttttttttagtttatttttttttatagaggttgttgcgttatttataaattgaattaaatgagggttgaaacggtacgttttagtatgtattgtagttatcgtggaagaataagtttttttaatattggggtatgtattgatttttaaaaaatgtttgtttggggaatgaaatatgtatatgtattttatatttatagatttgttttcgaaaatttttttatttaatattatttaattatgaatttgttttgtttttagaggaatggaatgtattttagtttttataaatttggggagagataatattttgtttaggtaagaggagaggaagtttaggggtttagttgtttatattgttggttagaggaggagatagattcgggagaggttttggagtgttttgtttttttttttttttttttgattaatttattttgggaaattttaatagtgttattgattgttatattttgggttgtattttttagcgtttatttttttcgattttaggttagggttggacgtgaaagttgggtttttgtttggtttcggtgtatgttttttttgtttatttgtttgtttttttttttttaattttattcgttttttttttttttttatataaatattttttttttttttttttttttcgttttttttttttttttttttttgtttatttaatttgttttaaaaagaaaattatttaaagggggggggtgtttttttagttttttgtatttttgttgttgttattttcgaagttgagtttttgttagagatttcgaggtttttagtttttttaaatagatagatatatattttttttttaaatgagatgaaatgagtggcgttttggggtggagggaggcgttggttggagtcggggttgggggtgggagggggtgagggaaaggttggggggggacgtattatttaacgttgttgttgtcgaaggtgtggtattgaaagttttcgttaacgtattttatgtttggtagttttatttcgtatttgtttacgtattagtagatgttacgtttgcggttacgggaaggtttgtattggggtgagtagagtaataggcggtgaggacggtcgtattttagggttttgtttttttttgttttgttttttgtttattttaaggtaagatttttatttttagagagttgagggtattagattcgatttttgggtttttggtgtttttattttacggaaagatttagggaaaatgtgaatttaggtagtttatttttggtaagtttttttaattttttttttttttttttttt

SEQ ID NO: 111 - DNA, 2501 bp, Artificial Sequence
  chemically treated genomic DNA (Homo sapiens)
aaaaaaaaggaaagaaagggattgaaggagtttgttaagggtaggttgtttaaatttatattttttttgggttttttcgtgaaatggggatattagaaatttaagggtcgggtttagtgtttttaattttttggggatgagagttttgttttggggtagataagaggtagggtagggaggagtagagttttggggtgcggtcgtttttatcgtttgttgttttatttattttagtgtaaattttttcgtggtcgtaaacgtggtatttgttggtgcgtggataagtacgggatgaagttgttaggtatggagtacgttgacggggatttttagtgttatattttcgatagtagtaacgttgagtgatgcgtttttttttaattttttttttatttttttttatttttagtttcgattttagttagcgtttttttttattttaggacgttatttattttattttatttaagggaaaaatatatatttatttatttgaggaaattgaggatttcggaatttttagtaagggtttaatttcgaaaatggtaataatagagatgtaaaaagttaaaaagatattttttttttttaaatggttttttttttgaggtaagttggatgaatagagaagggaagagaggaagaacgagaggaagagaagggaaggaagtgtttgtgtagaagagagagaaagacgaatagagttaggaaaaggaagataagtaggtgggtaggaaggatatgtatcgagattaggtaggggtttaatttttacgtttagttttggtttggggtcgggagaggtgggcgttagaagatgtagtttaggatgtggtaattaatgatattattggggttttttaggatggattggttagggggagaaaggaaaaggtaaaatattttaggatttttttcggatttgtttttttttttagttagtagtatggatagttggatttttgaattttttttttttttatttgggtagagtgttgtttttttttaaatttataaaaattaaaatgtattttatttttttgaaagtaaaataaatttataattgagtgatattaaatagagaggttttcggaagtagatttgtgaatatgaaatatatgtgtatattttattttttaggtagatattttttagaaattaatatatgttttaatattggaaagatttgtttttttacggtgattatagtatatgttgaagcgtgtcgttttagtttttatttaatttaatttgtaagtagcgtagtagtttttgtgggggaggataggttgaaaaaaaaaagtgggttcgtatttatttataggattttatatagttatatataggtatataaatttattttttttttttgttttttttttttttttttttttttaaaggtttgtattaattttttaaagtagtttttataggggtattgaggagtttttttattttgggaaaattgagaaaatttatatttttttaatataattcgtaatagtatttttgtttgtttcgaggtagagtttttcgtgagtaataaatttagtttttttgtggggtatagtattggatttgatagtgattttttacgtgtgtttatttgtatttatcgagttaggtagaggttagtttttcgtggtgtatatagtacgcgttttagtttattttattttagtttttaaatttttaggaagttatagttttcggatattatattatatgagtttaataggtttacgatggatttattagttttattttagttttttttttttatttgaatagaatgtgtatttttggaagttttttttattttttatgttggtagagtaggagggagattgaagtaagagatggtagagggagatggtggtaaaaaggtttagatgtaggagaatagtaagatggatggtttcggttagagtcgatgtggggaggaatagagggttgaagggagagggggttgattgttttattttagttttggtataaagtagtagaaagggggaaaagttaatagaaatttttttagtttttttattatatgtattttttaggatttgagaggaaagagaggaaaatgggggaatgggttgtaaaatagaaatgagtttaatttaggtcgtagagttagggaaggtgagtaattttaggagggtgttagattttagaagttagataggaagaattagtttaaattggttatgttttggaagggataagattatgtgtttcgttgtttatttttagtttgtaatgagggattgaggtttacgagtttttttagttttttttttattttggttagtttttgtattttttttggggtggaggatggaaggaaagttgggataagtagggaacgtatgatttagggatgttgttattcggtagttagatttcgaaatttttattttttaatgatttttttaattaatgggtggttttgtgattgttttttaaggttgaagatatttaggaaagggggtttggat

SEQ ID NO: 112 - DNA, 4001 bp, Artificial Sequence
  chemically treated genomic DNA (Homo sapiens)
tttttttattagttttggtgaaatgggtggtcgtgttgaggagattttttttgtaaggaattgaaggtggttttagtcgatagttaatgagaaatggagggtttttgttttatagggaataaagaattgacgttattaataattatatagatttggaggtagattttttttttattgagtttggggatgagattagagttttggatgatatattgatggtagtttttagatgaaattttgagtagaggatttagtttagttgtgtttagatttttaatttataaaattttgagattataaatatgtattgttttagttgttaaatttgtgggaatagtgtagaagtttttttttgtttttggagtatggtaaggtttaggttattgttttatgattacgaaaaattaggtatatggatatggagagtgagtagggtagagtagaatttattgggaaaaaggaaagtttttagtaaagataggggttttgaaagtaggttgttagtaaggcgtttgtgttttgtgttttttatgtggtagaagttgggaagttttttgtgggttttgtttagatgagagaagtaatattttttttttggggtattatagttgtgtatgtttaagttttgttaaagggattttattttggttattatttatgagtgtttaagtaaaatttatgggggtgttaaaattataatgttaatgttatgtttaatgatattataatgagttgggttaaattagggatatttaggttgatttattgtgttcgtattaaagttgggatggttatttttgagtaatattttagtttaagggtaatttttttcgttttttttattaattgtagaggtagtataggtattgttttgtcgttgtttttgtgaatatagtttttttttatttttttttttgagattttttttttttatgtgtttatttattttttaattatttttttttttaatagtgttatatagtaataaataatgtattttttttttgatttttggttatattatcgatttagttttaggggtatttttaatttttttgttttgttttaaatatataagggtagagtatatcgtttttttatattatggaaattatattaatagttattagattgaaaaatttttgagttttatattttttttggttaaaggtttttttatgtttaagatattggtttgaatatttaatttttgtttatagggggtggtaaaatatggtagttgaattgtttgtttagtattttttgtttgtattattttttttgatattattgggtatttttgttatttgggttttttgattattattagagagatttttggtttttggtttataggggatggtaatttggtttataggtttatttttgaagattatttagattttgttttgtgaaaggagagtggtgttaagttatttttataggagttagtgttttttaagtttgtttttttttttaaaaattagtttttattatataagtaatgtatgagtatatttttttagttagaaaagtaagttttagttttaatttggaaatgttttttaatttttattatggagtttgggtttttattttatttgtttgtagtaagattgttatgagtttggtgtttttttttagatttttttttatgtttggagattttttttatttttttaagagatagggttttgtttagttatttagattggagtgtagtggtaagaatatagtttattgtagttttaaatttttgggtttaagtgatttttttattttagttttttgggtagttgggattatgtatgagtaattgcgtatagttaattaaaaaaaatttttgggagataggggttttattatgttgtttaggttggttttaaatttttggttttaattgatttttttattttagtttttgaaggtgttgttattatagttgtgagtaattatatttggtttgttttggggatttttgtatgttagtttatatagtttagttttattttttcgttgttatatggtattttatagtattgataggtatttatacggtttttatttatttgttattatagataatgttatagtgaatattttagtatatgtttttttgaatgttttttttttttttttttttttttttttgagatagagtttcgttttgtagttaggttggagtgtagtggcgtgatttcggtttattgtaatttttgttttttaggtttaagtaatttttttgttttagttttttgagtagttgggattataggtatatgttattatgtttagttaatttttgtatttttagtagaaacggggttttattatgttggttaggatggtttcgattttttgatttcgtgatttgtttattttagttttttaaagtgttgggattataggcgtgagttattaagttcggttatggatgagtttttatagtatggaattgttgggttataggatatgatttaaattttataattgttttttaaagtagttatattaatttataatttgattagtaggaaatgtatattatttttttaagttttgttaatattttagaaattttttatttatcggatagaaggaaatatggttttttattgttgtaattgataattttttatattataaatattttttagatatttttggttatatttttattttataaattgtttatggattttgtttatttttaaaaatttagttgttttaatgatttataggtttttatataatttttatattagtgttttttgttttatttgttatttatttgtgggtgttttaggaaaagttgtagaatttgattttatttaattggtaaattttttttttgtgattgttattattttaaaaagtaaaagaataaagaatggttattttataggtagagtagtttatggtttttttttttttacgtttttaaagaaattttttttatttcgtggttataaaaatttttatatttttattaatattttaatagttttgtgtttaatgttgggttttaaattttagattaattttagtgaatagtgttaagtggggttttattatttttaatgagtaagtaattgttttaattttattggttagtttattagtttgaaatattgtttttattatattaaatttttatgtgtatataggacggttttcgaatttcggttaagtttattagtattatagttttatttgtgttatttttatttagtttttatagggattttagttttatttaatatatttgttttttttaattgtgtaatttcgttttttttagtatttatttttagggtttgggtatgaatttatagtttttgaatttagttggggagtagggaaatgttagtatcgtagcgatttaatttatattttgatgattttttatatatttttttttttttttagtttttatatttaagagaaatttagttggatattagtaatataagtgttatttattgaaaagagtaaagtaagagcgttgattttttacggataggatgaaataaaataagttttgtaagtttgttttttgtttagtatataggtttgttgttttattgggttattttgttgttgatgggtattttgtagaattgattagattgtaagtaggtagcgattttttttaaagtttgaaaggaaaatatattaaattttataacgattttaatttagtttaatagatgtatattagaatagtaatatttacgtgttgtttgcgtttattttttttatttttttgtagatagtgtttttaaggtatagaagttaggttttttttaagatttaaaggtttagaggtgtttaattattgattttattaggtaaaagtcggggaagaattttttattatgggattttgtaggttttaggggagtttgtgagtgtttttataagagaaaggtgtaggaaacgttattttaaaacggtatatgaaagtttttaggtttgggaatttatttaggtatttgggg

SEQ ID NO: 113 - DNA, 4001 bp, Artificial Sequence
  chemically treated genomic DNA (Homo sapiens)
ttttaagtgtttggatgagtttttaaatttgaaggtttttatgtgtcgttttgaggtgacgttttttgtattttttttttataaaaatatttataggtttttttgggatttgtaggattttatagtggaggattttttttcggtttttgtttaatgggattaatggttggatatttttagatttttaagttttgggaagagtttaatttttatattttggaggtattgtttataaaaaaatggaggaggtagacgtaggtaatacgtgaatgttgttgttttggtatgtatttgttggattgggttggggtcgttataagatttggtgtattttttttttaggttttggagaaaatcgttgtttatttatagtttgattagttttgtaagatgtttattaataataagatggtttagtggggtaataagtttgtatgttgagtaggaggtagatttgtagagtttgttttgttttattttgttcgtaaggggttagcgtttttgttttgttttttttaatgaatagtatttatgttattggtgtttagttgagttttttttgggtataaaggttaaaagggaaaaaggatatgtggagaattattaagatatgaattgaatcgttgcgatattggtatttttttattttttaattgagtttaagggttgtaggtttatgtttaagttttgagagtgggtattagaaaaaacgagattgtatagttggagagagtaggtgtgttaaatgggattggagtttttgtgaagattgggtgaggataatataagtaaaattgtggtattgatggatttaatcggagttcggaaatcgttttgtgtatatatgggagtttagtgtgataaaggtagtattttagattggtgggttagttaatagagttgggataattgtttatttattaaaaataatagagttttatttgatattatttattaaaattaatttggaatttaaggtttaatattaaatataaagttgttgaaatattgatgaaaatgtaagaatttttgtgattacggggtaggagaagtttttttaaagacgtaaaaagaaaaaaattataggttgttttgtttgtggagtagttattttttatttttttattttttaaaataataataattataaaggaaagatttgttaattgaataggattaaattttataattttttttaaggtatttataaataaatgataagtgagataaaaagtattagtataaagattatataaagatttataaattattaagataattgagtttttaaaaatggataaaatttatgaataatttataaaatagaaatatagttaaaaatgtttaaaagatgtttatgatgtaaggaattattaattataatagtgagaaattatatttttttttattcgatgagtaaaaagtttttaaagtgttggtaaggtttaggaaagtgatatgtattttttgttggttaagttgtaaattagtatagttattttggaggataattgtaaaatttaaattatattttatgatttagtaattttatgttataaaaatttatttatggtcgggtttggtggtttacgtttgtaattttagtattttgggaggttgaggtgggtagattacgaggttaagagatcgagattattttggttaatatgatgaaatttcgtttttattaaaaatataaaaattagttgggtatggtggtatgtgtttatagttttagttatttaggaggttgaggtaggagaattgtttgaatttgggaggtagaggttgtagtgagtcgagattacgttattgtattttagtttggttatagggcgagattttgttttaaaaaaaaaaaaaaaaaaaaaaaaaaaatatttaaagagatatatattaagatgtttattgtggtattgtttgtaatgataaataagtggaaatcgtgtaaatatttgttaatattatggagtattatgtggtaacggaagaatgagattgaattgtgtgaattaatatgtaaagatttttaaaataggttaggtgtggttgtttatagttgtaataataatatttttagaggttgaggtgagaggattagttgaggttaggagtttaagattagtttgggtaatatagtgagatttttgttttttaaaaattttttttaattagttgtgcgtaattgtttatgtatagttttagttatttaggaggttgaggtgggaggattatttgagtttaggaatttgaagttgtagtgagttgtgtttttgttattgtattttaatttgggtgattgagtaagattttgttttttaaaaaaataaaaaagatttttaagtatagagaagagtttggagggaaatattaaatttataatagttttattgtaggtaagtgggataaaggtttagattttatggtggaagttaaagggtatttttaagttaaggttaagatttgtttttttaattaagagaatgtgtttatgtattgtttgtgtagtagaaattagtttttagaaaagaaagtaaatttaagaaatattgatttttgtggagatgatttggtattattttttttttatagagtagagtttgaatagtttttagagataggtttgtgggttagattgttattttttatggattagaagttaaggatttttttagtgatggttagagggtttaaatggtagggatatttagtgatgttaggaggaatagtatagatagaaggtgttaagtagataatttaattgttatgttttgttattttttgtgagtagggattaggtgtttaggttagtattttgggtatgggggagtttttggttagaagaggtataaagtttagaagttttttagtttgataattattgatataatttttatagtgtgagggagcggtatgttttatttttgtgtatttaaggtaggatagagaaattgaggatgtttttggggttagatcgatgatatgattagaaattaaaaagggaatgtattatttattgttgtgtaatattgttaagagaggaggtagttaagggatggataggtatatagagagggaaggttttaggagaagggatagaaaggaattatgtttataagaataacggtaagatagtgtttatattgtttttatagttaataggaaaaacggaagaagttatttttaagttaggatgttgtttagaagtgattattttaattttggtgcgggtataataaattagtttaaatgtttttaatttaatttagtttattataatgttattaaatatgatattagtattgtggttttagtatttttatgggttttgtttaggtatttatgggtaataattaagatggagtttttttggtaaaatttaggtatgtatagttgtagtattttaagaagaaaatgttattttttttatttgggtaaaatttatagaagattttttagtttttgttatataaaagatatagaatatagacgttttattggtaatttgtttttaagatttttgtttttgttgagagttttttttttttttaataaattttattttgttttatttattttttatgtttatgtgtttaatttttcgtggttatgggataatagtttgaattttgttatattttaggggtaaaagaagatttttatattatttttataaatttagtagttaaaataatatatgtttatggttttaaagttttgtggattaggagtttgggtatagttgaattgggttttttgtttagggttttatttgaaaattgttattagtgtgttatttagagttttgattttatttttaggtttagtgggagaaggatttgtttttaagtttgtgtaattgttgatagcgttagttttttgttttttgtgggatagaggttttttattttttattggttgtcggttagagttatttttagttttttgtaaaagggatttttttaatacggttatttattttattaaagttagtaaaggag

SEQ ID NO: 114 - DNA, 3501 bp, Artificial Sequence
  chemically treated genomic DNA (Homo sapiens)
ttgttttatatattttattatattggaataatttatgtttttggttttttggtttggtatttggatggtttgttgtttatattttttttttttttattaattaggattgttattgttattattgtttgttgttgattttggatttgtttttggattttttggaggtatttgtaggttaaaaggagataatgtaagtatattaatattaataatgttagtgataataatgattttttaaggggtttgatttatttaaagggattaagattagataattgtttagttatgtttttaaaaatgtttgagttaggaatagtggataaatgagtttgtgaatttttgaaaatttgttttttaagttttgaaatatttaaggttaagttattattttaggtttttaaatgttttgagatatttttttagttatgttgatatttattataagtataaggtattatgtaataattagaagtattttaattattttgtaattgtatatggtgttttaaatttatattttttagttagattatattttggtggagattattaatttgattagttaatttttgattaatttgagtttgagaattttaaagtttggaggagtttttttgttatgttttaatttaatatattgaatggtttgaatagaattgtggatggtaattttagtagttgttgttgttgtagtaattgtaattagttttgtaatgatggtaataagagtaaaaataaatttttttgtttttttgtggatatttttaagaattttattgattatgtgaatagagggggaagatttttatggatgatgtaaagaaattggtatttatattttttttttagtttttattaagagagtatttgtagtgggattaaaagtagtattaatgtatgtgaatagtttatagttattatattttatagtttgtgtattgggaatgataattatatttttaattaatagtatgtaagggggtttgatatagtttttgatgggtattatttgtttagatatgagggtgatgttgaatgtgggtgttttggtattagtgtgaaggagttgataggtagtgttttatatttttatttttgttatagttgtagttaatttttatagttgaggatgttttggggtaataaagggatgaattatttttggtttaggaggagtaatgtttgtatttatttatttaaataggtaaggggatatttattgttttagtttgtatgattgttatttattttttatataatttaataaataattaaattttgagtatgaggtatttttgttggagtaattttgttaataatgtttttttggagtttaattaataataatatttgtggttagattttggagtataatggttttaggagtattataattattttataaaattgaagttattataaaaggtttttttgtaggtttttttaattaaaagagaggttgggtatagttgtttatatttgtaaatttagtattttgggagattgaggtgggtagattatgaggttaggagtttaaaattagtttggttaatatggtgaaatttttgttttagttttttgagtgttgggattataggtatgtgttattatgtgtagttaatttttgtatttttttagtagagatgaggttttattatgttgtttaggttggttttgagtatttgattttaatttgaggtgatttaattattttagttttttaaagtgttgggattataagtatgagttattgtatttgggttttagttattttagaatagtatgttgttttgtatttggagggtttttttgtaaatagtttattaatattgagtgtgtttggaaagatttggtttttaaataattggttttgtttgtgtaaaatgagttttgttgtatgtattaaaaattattttggttgggtgtggtggtttatgtttttaattttagtattttgggaggtttgttttgttgttagggaggttgtaaaaggaggatgtggttatttttgtttttattatggaaggttgggattttataggtatagaaaggaaggagggagagatgggaatgtgattgttttttagatatagtttttggtaggattggatgtgggagagtgagggttttattttagttggggtttatttaggtttatgttttggatatgttgagagtttttttggaaggtagggatatagtgtggtttaaaaatatataaatgtttttattggtttaggggttgttataatagattggaagggtgatatattttaggtgtttgttatttattatatgtattttttatttattggtatttttttattttaggtatatataaagttttagtttagagattaattttggatttagttttgaatttgtatattttgtgtgtagatttattttttataatttttgtttagtttagtttgtgtattatttttttttttttattaggggaggagtttgttttggtatttttattggtttgtagatttattttttttgggtagggttttaggatttaggataatatttgtgttttttgtttagaattttttaagtagatataatggtaagaatggtgtttgttttgttgtttttgttgttgtttttgggttttgttgttttttaggagaattaagatggtgagtggggaaagtaagggatgggtgttggagaggattggaaggaggtgaggaataggatatgtggttgggagataggttggatgtagttgggatattttggtatatggtaggaatgggtgtttaaggttgttaatttttttagtttatatatttttaggagtatttagggagtttttgtgttggtttgaaataagatttttaggaatttgaatttaaaatttttagtttatagtgaaaataaagattttaaagattaagtgatttgtttggggtagatagttaggatggagtaggaattatatgtttggagttgtttttgtttttgttttttttttttttttgatggttgggtatatttgtttgatgttgatgaaaagagagagtagttttaaggggaaagtgggaaggtaggttggttggagggatggtgttagaaggaaatttgtgtttaaattttatatttagatattattgtagtgggtttggaaggtgagtggttggaagagaagagagtgggagttttgggagattaagagttatttttaggataagggaaggaggttgtttgtggtatgagaatgtgtaggataaagatatggaagtgaatggttttttagttgtgtgagtttaaaatttatgatatttataaattgttagaaaaggtgttatatgtttgttatataataattattttggaatgttaatttgattttgtgttaaaatttgaattatttagggttttttagagaaatagaattaataggtggtatatatatatatatatatgtatgtatatatatatatatatattgtatatatatggatatatatatatataggaagagat

SEQ ID NO: 115 - DNA, 3501 bp, Artificial Sequence
  chemically treated genomic DNA (Homo sapiens)
atttttttttatgtgtgtgtgtatttatgtgtatatagtgtatgtatgtatgtgtatgtatatatatatgtatatgtgtattatttattagttttgtttttttggagaattttgagtaatttagattttggtatagaattagattaatattttaaagtgattgttatataataaatatataatattttttttgataatttgtaaatgttatgaattttaaatttatataattgagaagttatttgtttttatgtttttattttgtatatttttatgttataaatagttttttttttttattttaggagtgatttttgattttttggagtttttattttttttttttttagttatttgttttttagatttattgtagtggtgtttgagtgtgggatttgggtatgggtttttttttagtattatttttttagttaatttgtttttttattttttttttggggttgttttttttttttattagtgttaggtaggtgtatttagttattggaaggagggaaggaataggagtagaagtagttttaggtatatggtttttattttgttttgattgtttattttaagtaggttgtttggtttttggagtttttgtttttattgtaaattaggggttttagatttagatttttgaaggttttattttgggttagtgtagaggttttttgaatgtttttggaagtgtgtgagttgagggagttgatagttttgggtatttatttttgttgtatgttagggtattttagttgtatttagtttgttttttagttatatgttttgttttttatttttttttagttttttttagtatttattttttgttttttttatttattattttggtttttttgggggatagtaggatttagaagtagtagtagagatagtaggataggtattatttttattattgtgtttgtttggagggttttgggtaggaggtatagatattattttgggttttggggttttgtttaggggaggtgaatttataggttaatgggagtgttaggatgggttttttttttaatagagaaaaaaaaatgatatataagttaggttgggtagaggttatgaagaatgaatttatatataggatatgtaaatttagagttgagtttagagttgatttttggattgaggttttgtgtgtgtttggggtggaaggatgttagtgggtaggaggtgtgtgtgatgggtggtaagtgtttgggatgtgttatttttttagtttattgtgataatttttgggttagtaggggtatttgtgtgtttttggattatattgtatttttgttttttagaaaaatttttaatatgtttaagatatggatttgggtagattttagttggggtgggatttttatttttttatatttgattttgttagaggttgtgtttggaggatagttatatttttattttttttttttttttttttgtgtttgtggaattttagttttttatgatggaagtagaaatagttgtattttttttttgtagtttttttggtaatagaatgagttttttaaaatgttgggattaaaggtgtgagttattatgtttagttaagataatttttaatgtatataataagatttgttttatatagatgaagttagttatttgaaaattaggtttttttaggtatgtttagtgttgatgggttatttgtagagagattttttgaatataaagtaatatgttattttaaagtgattggggtttgggtgtggtgatttatgtttgtaattttagtattttgggaggttgaggtggttggattattttaggttgaggttaggtatttgagattagtttgggtaatatgatgaaattttgtttttattgaaaaaatataagaattagttgtgtgtggtggtatatgtttataattttagtatttaggaagttgaggtaggggttttattatgttggttaagttggttttgaatttttgattttgtgatttgtttgttttggttttttaaagtgttgggtttataagtgtgagtaattgtgtttagttttttttttggttaaagaaatttataaagggattttttatagtgattttaattttatggaataattgtaatgtttttaaggttgttgtgttttaaagtttagttgtaggtattgttattgattgggttttaaaagggtattattggtaagattgttttagtaaaaatattttatgtttagagtttaattatttgttagattatgtagaggatggatggtagttatataggttgagataatgggtgtttttttatttatttaaatggatggatgtaggtattattttttttagattaaaaatgatttatttttttgttattttagaatatttttaattatgaaaattagttgtagttatgataggaataaggatatggaatattatttattaatttttttatattaatattaaaatatttatatttaatattatttttatatttgaatgggtgatatttattaggagttatgttaaatttttttatatgttgttggttggaaatataattattatttttaatatataaattatagaatgtgataattgtaagttgtttatgtgtattgatgttatttttaattttattataagtatttttttggtaagggttagggagggggtatggatattagtttttttatattgtttatgggagttttttttttttatttatatagttaatgaagtttttaaaggtatttgtaaaagaataaagagatttatttttatttttattgttattattgtaggattaattgtggttattgtaatagtagtaattgttggagttgttatttataattttgtttaaattgtttaatatgttgaattgaagtatggtagaaaaatttttttagattttggaatttttaggtttaaattgattaaaaattagttaattaaattaatgatttttgttaaagtgtaatttggttgggagatatgaatttggaatattgtatgtaattatagagtgattggaatatttttgattattgtataatgttttatgtttataataaatattaatatagttgggaaaatgttttaagatatttaaaagtttgggatgataatttaattttggatattttaaaatttaaagagtaaatttttgaggatttataagtttatttatttattgtttttggtttagatatttttgaaggtataattaaataattatttgattttaatttttttaaatagattaaattttttggaggattattgttgttattggtattattaatattggtatgtttatgttgtttttttttagtttgtagatgtttttaaggagtttgaaaataaatttgaagttaatgataagtaatgatggtgatggtgattttagttaataaaaaggggggagatgtgggtggtaagttatttaggtgttaagttaagagattgagggtatgagttgttttagtataataaaatatataaaataa

SEQ ID NO: 116 - DNA, 4701 bp, Artificial Sequence
  chemically treated genomic DNA (Homo sapiens)
tttattttggttttttaaagtgttgggattataggtgtgagttattgtatttggtttaatttatttttttatgtagtttattgtgtatttattttttttagggaattttagttttataagggtagggtttttttgttattttggtttatggttatattatagagtttattttagtgtttggtatatattaaggaatgtattaggattttaaaattagttaggagtggtggtttatgtttgtaattttagtattttgggaggttgaggtgagtggattatgaggataggagtttaagattagtttggttaagatggtgaaattttgtttttattaaaaatataaaaaattagttgggtgtggttgtggatatttgtaattttatttatttgggaggttgaggtagagaattgtttgaatttgggaggtagaggttgtagtgagttgagattgtgttattgtattttggtttgggtgatagagtaagatgttattttaaaaaaaaaaaaaaaaaaaaaaaaagattataaagtttagaatgttataagattataggtggtgtagtgaatagggtattgttttgagagtttattatttttgggtaagttattaaatataggggtgggggtgggagttttttgtttgtaatgtggaggtgttatgtgttaagggtttaggtatatgtgtgtgtatgtataaatatatttattagtaaggatatgatttttggtattttaatgtgatttatatttttttatgaaggaatttattttttttttttattaattttagagataggtagagttgataggtggaagaattgaggtttgagagagatagtgggggattttttttgtgttatggtatagtagttgtttgattttttttttatgtttggggggtgtgatggttgttgagggttgtgggtagggggtgtggtgttggggattatattttttaggagtagttgttgtggttttgttgtttttggggttttaagagttttgtgttaaagggggtgggggaggttgtgtagtttgttagttggaagatggttttgtgtttggtggggatttgagagttgtttgtttgggtgtttaggtggggtttggttgtagtgaagaagttttttagttttgtagtgtttttgaggggaggtgaggtgaggtgaggtgaggtgaggttaagttaattggaggttgtttttttttgttttgtttgttttggttttggtttttgtgtttaagttttagggaattttttttttttttttttaattttttggaataggggaaggggtggtgaattttgttgtttggtgggagaaggggtgtttattagttggaagtttttgtaatttgaggtaatttttttttttaattttggttttagttttgggaatttataggttgttgggatgggtggggagaagggataggagagatataaaatgaaatgaatgtttaggtgttagggagttgagttttatagtattttgtttttaatttatttttttaagttttgggtttttgtggtaaaataggggtgatggggatagtgattaaaggtaggaggtgtaaaggatttagaaattggtggggagtattgtgtaaattgtaaagtgttgtgtaaataaaattattgattgttgtgttattggatttatttagtttttaagatatgtatggatttggggtgggggatggggtgatatggttttgggtttttagggtggaatattttggatatggggagggggggttatttgggtgtgtattaatttaattaggttttaatgggaatttgagttgtttttgaaaataattaaaataaagttattagaatgttgtgtttttaaatgatgaaatttaagagaaattgatattattaaaagatgaattttgattttttgaattaatttgattttttattgttttttttttttgtttgtgttatggagataagtttagagagaaggtatttgatattgagttttgtgtttttttttttttttttttttttaattatttggattaatttattttttggtgtgtgggggaaatttattaatttgttttggttttagagatttttaggtttagtaggagtttttttatatttatgtagttatgattttgtttttaatattaaaatttttgaattttttttttttatttttttttagtagtttattgtgtttgtaaatagtttttggattatattgggatgtgtttattattttgattagtaataaatttttatttttagggtattgtttaagtgaatagtgattggtttttatgtttagggaataaaagtggggttgtgggagaggggtttagggagtaaatgttgtagaattttagtttagggttgttgttaagtggatttggtatgtgagtaggaggttggttgtagataaggggttttagggtttttgaggttttttttgttggtttttgggtttttaaagttttttgagttttagaattttttatagatagtggtgttttgtgtttgttttgtttatatttgttaagtagtatgggaaaatttgtgtgtattttaataaagatattgtatttttttagtaaaatggtggtggttgtggttatggttttttaaataattttatattttttgaggataggttataatttaagggatataattttttttttgatttttattttagtgttttgtttttttaagtttttaaagtatttagggtttttttttattataggggttttttggattgtttttggttagagtttttggggtagtttttttattgtggattgtttttttttgtttttatattgtttttaaggagttttgggatggggattgaatttttaggttgggttttatggatggggggtagtgagttttgtttttgatattttaaaatttttaggttaagagaagtatataaatgaatttttgattagggtatatgggagatgtaggggtttttgaggagaagaggttatttgggaggttttttttattttttagagggtttgggtagtattgggggtttggttttaggagggaattttaaggtagaggttggggggtgtgttgggggagagatggtagaggagggggaagggataaagtttgaaagtatttttttaatttttttagggaaagtttttttgggggttttatggatagagggggtagaggtgtggagggattggtggtggggtgatttttgagaggtgattggattttgggggagtgattttttttttttgttttggtttggtttggttgggagttgtttagtttggggttgtgtgtgttagttggggttgttttttggtagttttattgggttaggggattttgtagtgggttgggagtagagtttttggtagttttaggggagagttttgttatggggggttttttgtattgaggttttttagttttgtagagttagttttttgtaaaggggaaatgtgttggtatattagtggtttttggtgttgtttggggtgtgtggtgggtgtggggggtggtggttgggttagtgggttgtttggtggggaagtttagggagttaggtagtggtttagggtggtggtggggagtaggaaggtttgggttggggggaaaggttggatttgtttggtggaagaaatatagatggtggtggtgtagtgttattttgggttgggagtaggtagttagtagttttgtttttattgtggtttgtttgttgttgttaaatatttggatgtgttgtttaagtgttagatgtggagttgggaaaagggaggtagaggaggtggaggtagaggtagaggtagaggtagagtttgagtttggtgttgagattaagtgatagattggtggggttgggttttgtaaagttggtttggtgagtttttttgatatttgagttggggaggaaaagtagtgattttttgtttgtatttttgggagttgtattttagattggtttggtagttaggggtttaggagtagattttgaggtaggttttgtttagtttttgatgagggttggttttttggaaggtgtttttaatagttggattagataggttattatgattgagaattttatgtttgtttttgtggttaagtttaagtgggttaaggtttttaagaagtttatagattattttaagtatttagatatgattgtggttgttatttaggttgagaagaattgtgttggttttttgtgttagtttatttagaagtatattaagagttattataaggtgggtgagaatgttgatttgtagattaagttgtttattaagtgtttggttattattggtgtttttaagtagattaaaggggtgggggttttggggtttttttggttagttaagagtgatgaatttaagaagttagtggtttttaagaagattaagaaggaaattaagaaggtagttatgttaaagaaggtatttaagtttaagaaggttgtttttaaagttttaattaagaaatttaaagttattttggttaagaaggttaagaagaagttggttgttatgtttaagaaagttaaaaaatttaagattgttaaagttaagttggttaaggtatttaagtttaaaaaggttaaattagtgaaatttaaagtaaagtttagtgttaagagggttggtaagaagaagtgataatgaagtttttttttgtggatattttttttt

SEQ ID NO: 117 - DNA, 4701 bp, Artificial Sequence
  chemically treated genomic DNA (Homo sapiens)
aggagggagtgtttgtaagaaaagattttattgttatttttttttgttggtttttttggtattggattttgttttgggttttattggtttggtttttttgggtttggatgttttgattggtttggttttgatagttttgggttttttggtttttttgggtgtggtagttagtttttttttggtttttttgattggggtggttttgggttttttggttggggttttggaggtagtttttttgggtttggatgttttttttggtgtggttatttttttgattttttttttggtttttttgaaggttattgattttttgggtttgttgtttttggttagttggaaggattttgaggtttttatttttttggtttgtttgaggatattggtggtgattaggtgtttgatggataatttgatttgtgagttagtgtttttatttattttgtagtggtttttgatatatttttgaatggattggtgtgaggagttagtgtggttttttttggtttggatggtagttatgattatgtttgaatatttggggtggtttgtggattttttggaggttttggtttgtttgggtttggttgtaggggtggatgtggaatttttggttatggtggtttgtttggtttggttgttgaaggtgttttttaaagggttagtttttgttggaggttgagtaaagtttgttttgggatttgtttttgagtttttgattattgggttagtttggagtgtggtttttggggatgtgagtgaggagttgttgttttttttttttggtttgggtgttgggagagtttgttgagttggttttgtgaggtttagttttgttggtttgttgtttggttttggtattgggtttgggttttgtttttgtttttgtttttgtttttgttttttttgtttttttttttttagttttgtgtttggtgtttgggtggtgtatttgggtatttagtggtggtgggtggattgtggtgaggatagggttgttggttgtttgtttttggtttggaatggtgttgtgttgttgttatttgtgttttttttgttgagtaaatttgatttttttttttggtttgggtttttttgttttttgttgttgttttgggttgttgtttggttttttgggtttttttgttgggtggtttgttggtttggttgttgttttttgtgtttgttatgtattttaaatggtgttgaggattgttggtgtgttggtatattttttttttgtggggggttggttttgtggggttagggagttttggtgtgggaaattttttgtagtaaagtttttttttgaggttattgggggttttgtttttggtttgttgtggggttttttagtttggtggagttgttggaaagtggttttaattaatatatgtggttttgagttgggtgatttttagttgggttgagttgggataggggggaggggttgtttttttggggtttggttattttttgggggttattttgttattggtttttttatatttttattttttttgtttatggggtttttaaggaaattttttttgaaagagttggaagggtatttttaaattttgtttttttttttttttttgttgttttttttttagtgtgttttttgatttttgttttgaggtttttttttgaggttgaatttttagtgttgtttggattttttgagagatgaggagggttttttgggtggttttttttttttaaagatttttatattttttatatattttaattgggaatttatttgtgtgttttttttagtttggaagttttggggtgttagagatagaatttgttgttttttatttgtgaggtttagtttgggggtttagtttttgttttaaggttttttgaaggtaatgtgggggtgggggagggtggtttataatggagaagttgttttagaagttttaattagggatggtttggggggtttttgtaatgaggagaggttttgagtgttttggggatttgggaaagtggggtgttagggtagaggttgaggagggggttatgttttttgggttgtgatttgtttttggaaagtgtggagttgtttagagagttgtggttgtgattattgttattttgttgggaagatgtgatgtttttgttaaaatgtatatagatttttttgtgttgtttggtaggtgtagatgaggtggatatggggtgttattgtttgtagggagttttgaagtttgaggggttttaggggtttagaggttagtaggagagattttagagattttaggattttttgtttgtggttgattttttatttatgtgttgggtttgtttggtagtggttttgggttgagattttgtgatgtttgttttttgggttttttttttataattttgtttttattttttaagtatagaggttggttattgtttatttaaataatattttgggagtgggagtttgttgttggttaaaatgatgaatgtattttggtatggtttaagagttgtttgtagatatagtgggttattggggaggggtaaaggggaggggtttgagggttttgatgttggggatgggattgtagttgtgtgggtgtgggagggtttttattggatttgggagtttttgaagttaggataaattaatgggttttttttgtatgttaagggatggattaatttaaatgattaggggaggaagggggagggggagtgtaagatttggtgttagatgttttttttttgggtttatttttgtggtataggtggggaagggaagtaatggggggttaggttagtttaaaaggttaaggtttgttttttgatggtgttaattttttttaagttttgttatttgaaaatataatattttggtggttttgttttggttatttttaaagataatttgggtttttattaagatttggttgggttaatatgtatttaaatagttttttttttttgtatttgagatgttttattttgagagtttagaattatgttattttattttttgttttagatttgtgtatgttttaaagattggatgaatttaatgatatgatgattaataattttatttgtatagtgttttatagtttgtatagtgttttttattggtttttggattttttgtgttttttgtttttgattattatttttattatttttattttattgtggaggtttgggatttagaaggatggattgggggtggggtattgtaaggtttagttttttgatatttgggtgtttattttattttgtattttttttgttttttttttttgtttattttagtgatttgtaaatttttggaattgaagttagaattggggaaaggggttgttttgggttgtaggggtttttagttagtggatatttttttttttgttaggtggtgaggtttattgtttttttttttgttttggggagttggaggggaagggagggggttttttggggtttgggtgtagaggttgaagttgaggtgggtaagatgaggaaagatggtttttaattggtttggttttgttttgttttgttttgttttgtttttttttagggatattgtagagttggggggtttttttattgtagttggattttgtttgggtatttaggtaggtggtttttgggtttttattgggtgtagagttattttttagttggtggattgtgtaattttttttgttttttttaatgtgaggtttttgaaattttaggaatggtggaattgtggtaattgtttttgggaaatgtagtttttggtgttgtgttttttgtttgtgatttttggtagttgttgtgttttttgggtgtgaggagggggttggatagttgttgtgttgtggtgtggggagggttttttgttgttttttttgggttttagtttttttatttgttggttttatttgtttttggggttagtgagagggggaaatgaatttttttatggaaaagtataaattgtattagaatgttaggggttgtgtttttattaatgggtgtgtttgtgtgtgtgtgtgtgtgtgtttgagtttttggtatgtgatatttttatgttatagataggaggtttttatttttatttttatgtttaatgatttgtttagggatgatagatttttaaggtaatgttttgtttattgtattatttgtggttttgtggtattttgggttttgtaatttttttttttttttttttttttttttgagatggtgttttgttttgttgtttaggttagagtgtagtggtgtgattttggtttattgtaatttttgttttttgggtttaagtaattttttgttttagttttttgaatagataggattataggtgtttataattatgtttaattaattttttgtatttttagtagagatggggttttattattttggttggattggttttgaatttttatttttgtgatttatttgttttggttttttaaagtgttgggattataggtatgagttattgtttttggttggttttggaattttaatgtattttttaatatgtgttaggtattgggatgggttttgtgatatggttataaattaaagtgataagagagttttgtttttgtggagttgaggttttttggaaaagatagatatataatagattatataaagaagtaaattaggttaggtgtggtggtttatgtttgtaattttggtattttgggaggttgaagtggg

SEQ ID NO: 118 - DNA, 2501 bp, Artificial Sequence
  chemically treated genomic DNA (Homo sapiens)
attttatagaaaagatataagtgtaagtattatggatttaagaattattttttaataaatgtttaagagataattatatttatttaggggaaaatgttatatgtttgagaatggattatggatgggtttaattagatgagagaggtatttagggagttgttttgagttatgaggttgaggagaaaattttttttttaattgaattttattgtttatgtattttttaaaatattatttggatatgtgggttttattttttgttttgtagttaggtagtttgttgagttatttttttggatttttataaatatttttatttttgtttatagtattatttttgtgttattattataagttttttttttttttttagatgtttataaagaaaggatgaggtaaagtttaatggatttatggtttttattgatttaagatggttatttgaaattattagaataaaattttttgatgaattttttttttaaaataaaattgaaaataaatggaaaagaaatatgaaatgtatgagagtttgagggagggattttaaagtgtttattgtttatttagtataatatatggttaaatttaataatgttttttttttttttgttttttttggttttttttaagtagaagaaagtatttaatattagaagtttttattttttataatagagttagggatatgtttttttttttagtttatatttggagtttaataataattataagtttaagatagtatttttagggatagaaatgttttttttaataagaagtataattaaatttttttatagatttaaaaattaaaagtaaatgaaattatatttatatttgttgttgattattttgtttgttagatttttgtttaaaataatgtttgattaaaaatggtattagggttttaatggtgagatatttttttagttattttgtagtaatttttttgtttattggtgtgaatttttattttattattttttttttttttttaaaagagaaattttgaaatttgagatttttataaatattaaagagtttattttgtaaataatttgttttttttaatatatttattattttttggtttttaaattaaagtttttttttagtgttatgtagatttaggttaatggttgaatttataattgtgtttttaatttttgtaagtattgggttattgttgtgggtttgtatttttattttattaatatgttggtgggttatttggatagttttttgtgtaaattgaatattttttaattatattagtgtttttttggtattaattttttttatttttttaatgaaaaatgattattatatatatttattttaaatatagagattttagttagaattgtttatttggaagttgtaatatttttttttatgtagtgatattttagagataaaagtttaagtggatttgaagatttgaagtggaaaataatttgtattggtaaagttgaataatgaagttataatttatgtttagttattttttgataatgggtagagtgatttattgtgttttttatgaagtttgagtttttgaaattgtagggtattttatatggttatgataatgatgtttgtgggaaaaggaatagtagttttgaaatatttataattaatataattttgattaaataaagaattttggtttttaatagttttgattattaaaaaagtttaaatttgtatagtaattattttaaaaataattatttaatgttttataattaaattgtatataatttagttttgggatatagaagttagtgaggtgagtttggagtagtttggtgtagttttaggagttaggagttgagtttttattggtttttttttttttgttattttgtttatttaagtttttggatagttggtataatttggttttgttgatgagtggatttgtattgggaagagagagtagtttgatttttatttttttttgtttttttttttttatttagttggattttttaaagttgtttaatgttttggtattttttttttaaaatagagatttggtttttaaagaggatggggttgagttttatttgagagtggattagtggtatgtagttaaattagttggtaaatgtatttatgtagttttgttgttgggtaaagtggttagggttagtttaatgggaagtttgagaagtttagggagaaggagagaaataaggataatgatgagagaagtgtaaggtgagatggaaatattgtagaaaatggagttaggtaaatgagtaagtagtaaagtttggggtttggtttggttattaagttttattatttatgtatttgttgaaaatgtaattgttgatattggttttttttaaggtatgttatgttttttagtgttaaaaatataaaaataaagatttatgttgattttaattttttaaaatttattgattaattttttggttagtttatgatttagtaattgaaatttgattattatagtgatttaattt

SEQ ID NO: 119 - DNA, 2501 bp, Artificial Sequence
  chemically treated genomic DNA (Homo sapiens)
agattgagttattgtagtagttgagttttagttgttaagttgtggattgattagagaattagttaataaattttagagaattaaagttaatatgaatttttgtttttgtgtttttaatattgaggaatgtagtatattttgggaaaaattaatattagtgattgtatttttagtaggtgtatagatggtgagatttggtggttgggttagattttaagttttgttgtttgtttatttgtttgattttattttttgtaatgtttttattttattttgtattttttttattattatttttgtttttttttttttttttagattttttgggttttttgttgggttgattttgattattttgtttagtgatagagttgtatgaatatgtttgttagttggtttggttatatgttgttgatttatttttagatgaggtttgattttgttttttttaaagattaggtttttattttgaggaagaaatattgagatattgagtgattttgaggaatttggttgagtgggggaggggaagtaagaagggatgggggttaagttgttttttttttttagtgtagatttatttattagtagagttagattgtgttaattatttaaaaatttagatgagtagaatgataaaaaaaaaaaggttaatgagaatttaatttttggtttttgggattgtattagattgttttaaatttattttattggtttttgtgttttaagattaggttgtgtatagtttaattatggaatattaaataattatttttgaaatgattgttatgtaggtttaaatttttttaatgattaaaattattaaaaattagagttttttgtttaattaaaattgtgttggttgtgaatattttaaagttgttatttttttttttatagatattattgttatggttatgtagggtgttttgtagttttaaaagtttaaattttgtggaaaatataataagttattttatttattattaagaaataattgagtataagttgtaattttattatttaattttgttagtgtaaattgttttttattttgaatttttaaatttatttgaatttttatttttaaaatgttgttgtatgaaagaaagtattatgatttttaggtaggtagttttaattgaaatttttatgtttgagatagatatatatgataattgttttttattgggggggtggggggaattagtattaagaaaatattagtataattaagaaatgtttagtttgtataaagaattatttagataatttattagtatgttagtgagatggaaatatagatttataatagtaatttaatatttgtaggggttgggggtatggttatagatttaattattgatttaagtttgtgtagtattgggaagaggttttggtttagaagttaaggaataatgagtatattggggagaatagattatttataagatgaattttttaatgtttgtgagaattttaagttttagagttttttttttgagaaagaaaaaggggtaataaggtagaaatttatattaatgaataagaggattgttgtaaagtaattgaggagatgttttgttattgggattttaatgttatttttggttaaatattgttttgagtaagaatttggtaaataaaataattaataataaatgtgaatatagttttatttatttttaatttttaaatttgtggaaaagtttagttgtgttttttgttaaaaagaatatttttatttttgaaaatgttattttgggtttatgattattgttaaattttaagtataaattgaaaaaaaaaatatatttttaattttgttatgaaaaatggagatttttgatattaaatgtttttttttatttggaagaggttagagaaaatagggaagagaaagatattattgagtttgattatgtattatgttgaataaataataagtattttagagttttttttttaaatttttatatattttatattttttttttatttatttttagttttgttttagaagaaaagtttattagagaattttgttttgataattttaagtggttattttaggttagtggaaattgtaagtttattggattttattttattttttttttgtagatatttgggagaggaagaggagtttgtaatgatagtatggggatggtgttgtaaataggagtgaaagtgtttgtggaagtttagagaagtgatttaataggttatttagttgtagaataaggagtagagtttatatatttagatggtgttttgagaggtgtgtagatagtgaaatttaattaaagagaggattttttttttagttttatgatttagaatagttttttaaatattttttttatttaattggatttatttatagtttatttttaaatatgtgatatttttttttaagtagatgtgattattttttaggtatttgttgaaaaataatttttaggtttatggtgtttgtatttgtgttttttttataaaat

SEQ ID NO: 120 - DNA, 4001 bp, Artificial Sequence
  chemically treated genomic DNA (Homo sapiens)
ataaaattgtgatagttattataggttttttaaagttatgttttatgtgattaaaaattatattttttttatttttttattatggttaataatattatgatatatatgaaaaagttttagtaatttttttttttaatagtgtttaaatattttattattatttttttttgatattttaaaattaaaattttgttatgttttgttatttgatgttgttatatttagttttttattttggaatttttagtatttttttaattagttaatatttatataatgtagtttttgtttatttatttgtttatatttttagggatataggatttttattaatatattttaaattgttttgtattaggattttatttttttttttttatgaggtaatattggttaattatttttttttagaatgttgattgttagttgaaggttgagttttagggattttttttaaatagaatttgagtaattagtgtatagttatatatggagtataatgttagttatgtagtgataattatagggaatattttttaaattaggatatggaatgttttttgaattgttaagaaagaaatgttatttttaatgtatttttgtaattaaatgtatttttattgataatttaggtattaagtagaatattttattaattagggtattttagttttagttttatagaaaataatttgttatatgtgattttatttgttagagtgtaaagagatgttattgattgttagatgtttaaaagttagttttttggatggttttattgatattatatttttttatttttaggataatattgatatataaattaatattttattttaatattttaatttggagaaaataagattatatatttttgtgaaaagaagagatggtattgaaattgagagggtttatagagatattttttattggaatagtattttttattggaaaataaagtaagaatagtaaaaatttatatttttattttttatttatttatatgaataaaaaaagaattagataattaggtttttttttgtatatttttttttgttgtaaaaaaaaattgaatattttgtggattttgaaaatgttatttgatgaagaggttaatttttttatatagaaaaaaataatatagattgtttgttttttttattggagtgagaaattttaaatagttaaagtataagtatatttttttttttgaggttattgaaaggttaattaaagatgtgttttttatgaaaggtattattgggagatttttttttttaaagggatatttaaaaaaagttaatagataaagattttggtagagtattaggaatagttattatatggataatgaattatgaaataaaaattgtttttagagaaatgtgtaggttgggtatggtggtttatgtttgtaattttagtattttgggaggttgaggtgggtagattataaggttaggagattgagattattttggttagtatggtgaaattttatttttattaaaaatataaaaaattagttgggtgtggtggtatgtgtttgtagttttagttgttggggaggttgaggtaggagaatggtgtgaatttgggaggtggagtttgtaatgagttaagattgtgttattgtattttagtttgggtaatagaataagattttgttttaaaaaaaaaatgtgttatgtattgataggtataagtaaagtatgtagtatataagaaagatatatatataatatatgtatgatttattaaataatttttgttaaattagtttttttaagatgtgtagttgtaatattaatatattttttttttattataaatatattttattttaattagattggtttttaaataggtatgagaataatatttttttttgatatggtttggttgtgtttttatttaaattttattttgatttggagtttttataatttttttgtgttatgggagggatttggtgggaggtaattgaattatgggggtgggttttttatatgttgtttttgtgatagtgagtaagtttttgatttgatggttttataaagggtagtttttttgtatatatttttttgtttgttgttatataagatgtgtttttgttttttttttattttttgttatgattgtgaggtttttttagttatgtggatttgagtttattaaatttttttttttttataaattatttaattttatgttgtttttgttagttttgtgagaatggattaatatatttttttttatttttttagagatattttagttttatttttggttaattttaaatagattgagttatgtttttaatgttattagttaggtgattgatttatgaataagtatttatattaaagagtaattatttatatttttagtaatattttgttttaaaaagggatttggaggttttttaaatggatatttttttgatgtatttatttgttttgtaagtttgttttatgtatttatttttaaatatagggtatgtttgttttgtgatgattaatttggtgatgttagaggtttaatattttaatatttttaatggatgaaatatggtatagaatttagagaaagttataagttatagatgggtttaaaaataaggaagtattatttttttatatgtggttaatattttttagttaattaagtttaagtatagttgttatataattaaagaataggggattataagggtttttaaaatataaagtagtttagagtttaagtttaattttgtttttagtagtttttggtggtgtgttttttttttgtttttgagttttaagttaaattttggttagtgagttagagtatagttttgtttttatttgtttttatttagaggtatttttttttttatttttgtttattgtaaaggttaattttaaaaatgattataaattaatggtttatgttttgtaaatatttattaattaagtttataatataagataagtgtttggatttgtttatagaaatatttattgtaaaattatatttagtatttttttgtatgttatttattgttaggtttttttagagtttaattagagttaattttttttttttgtttatattaaatatagtttgttagagtgggaagaaaaaggataatgataatttttattaaaataattattatatggtataaaatagaaataattttgtaagtttgatgaggttgggtgtggtggtttaggtttataattttagtattttggtaggtttaggtgggtggattataaggttaggagattgagattattttggttaatatggtgaaattttgtttttattaaaaatataaaaaaaaaaaattagttgggtatggtggtaggtatttgtagttttagttatttgggaggttgaggtaggagaatggtgtgaatttgagaggtggagtttgtagtgagttgagattatgttattgtattttagtttggatgatagagttagattttgttttaaaaaaaaaaaaaaaaggaaatataagatttaggataaaagaaaaattagtagtgaaaaaatgttaattgtaattatgatattttggtgaggataaatgttaattttttaattagtaattagttgtggaatagtgttgatgttagaaaataaatgagtattgattatggatggtatttgttattattgtaattagttttttaaaaattattttttttttgttaagtttaatatttttggttaaaggttaattagtgattaataatgatttgaataaagaaaggaatgaagaaagagggagagagaaagggaatatttggaaggtgaaagtatatgaatgataggaaaaaagtttataaatgatattgggtaaagaattataggaaatagaagaaggtgttttgaagtgtttaggagtaattataagaggatagttattttggttttgaaagatatgtaagtaattgtttaaaatattttttttaagttttgtaaaatatatagttttaaaaaga

SEQ ID NO: 121 - DNA, 4001 bp, Artificial Sequence
  chemically treated genomic DNA (Homo sapiens)
tttttttgagattatatgttttataggatttaaggagaatattttaaatagttatttgtatgttttttaggattagggtagttatttttttataattatttttagatattttagagtatttttttttgttttttgtaattttttatttaatattatttataaattttttttttgttatttatgtgtttttattttttaaatattttttttttttttttttttttttttatttttttttttgtttaaattattattaattattaattgatttttgattaaaagtgttagatttaataaaagggaggtagtttttaaaaaattggttgtagtagtaataaatgttatttatggttaatgtttatttattttttggtattaatattgttttataattaattgttgattagggagttggtatttatttttattaaaatattatagttatagttgatatttttttattgttgattttttttttgttttgggttttgtgtttttttttttttttttttttgagatagagtttggttttgttgtttaggttggagtgtagtggtgtgattttggtttattgtaagttttgttttttgggtttatgttatttttttgttttagttttttaagtagttgggattataggtgtttgttattatgtttagttaattttttttttttgtatttttagtagagatggggttttattgtgttagttaggatggttttgattttttgattttgtgatttatttatttaagtttattaaaatgttgggattataggtttgagttattatatttgattttgttgaatttgtgaggttatttttgttttgtgttatataataattattttgatggaaattgttattgttttttttttttttattttgataggttgtgtttgatgtggataagaagaaagggttgattttgattgagttttgggaaggtttgatagtggatgatgtatagaagagtattgggtgtgattttgtagtaagtatttttgtgaataaatttagatatttgttttatattataggtttgattaatgggtgtttgtaggatatgaattattaatttgtgattatttttggagttgatttttatagtgaataggagtagaaggaagggtgtttttagatgagagtaggtgggaatagagttgtgttttgatttattggttaaggtttggtttaggatttagaagtaggaaggggatatattattaggagttgttagaaataaggttgagtttgagttttaagttattttatgttttgaaggtttttgtaattttttgttttttggttatatggtagttgtgtttgaatttgattaattgaaaaatgttagttatatatggagaaatgatatttttttatttttaaatttatttatgatttatgattttttttaaattttatgttatattttatttgttgaaaatattaaaatgttgggtttttgatattattaggttagttattataaaatagatatgttttgtatttgaagataagtatataaaatagatttataaagtagataaatatgttaggggagtatttgtttaagaaatttttaaatttttttttaaaatagaatattattgagaatataaataattgttttttaatataagtgtttatttataaattaattatttagttaatggtattgaaagtatggtttagtttatttgaagttaattaaaagtaaaattaaaatgtttttgaagaaatgaaggaaagtgtattagtttatttttatagagttaataaagatagtataagattgggtagtttatagagaaaaagaggtttgatggatttaggtttatatggttggggaggttttataattatggtagaaggtgaaggagaagtaaaggtatgttttatgtggtagtaagtaagagagtgtgtgtagggaaattgttttttataaaattattagattaaagatttatttattattataagaatagtatgtgaaaaatttatttttatgatttagttattttttattaggttttttttgtgatataaggggattatgggagttttaaattaagatgagatttgggtggggatatagttaaattatattagaaagggatattatttttatatttatttaagaattaatttaattaaaatgaaatatatttataatgagaagaaaatatgttaatgttatagttatatattttggagaaattaatttaataaaagttatttgataagttatatatatattgtatgtatgttttttttgtgtattatatgttttgtttgtatttattagtgtataatatattttttttttaagatggagttttgttttgttgtttaggttggagtgtagtggtgtgattttggtttattgtaagttttgttttttaggtttatattatttttttgttttagtttttttagtagttgggattataggtatatgttgttatgtttggttaattttttgtatttttagtagagatggggttttattgtgttagttaggatggttttgattttttgattttgtgatttgtttgttttggttttttaaagtgttgggattataggtgtgagttattgtgtttggtttatatatttttttaaaaatgatttttgttttatagtttattatttatataataattgtttttggtattttattaaggtttttgtttattaattttttttgaatgtttttttggaaaaagaagttttttagtaatattttttatgaaaagtatatttttaattagttttttaataattttaaggggaaggatatgtttatattttaattatttaggattttttattttagtgagaaaagtaaataatttgtattatttttttttatgtggaagaattaatttttttattagataatatttttaagatttatagaatgtttagtttttttttgtagtaaaagagaatgtataaaggaagatttggttatttagttttttttttatttatgtgggtaaataaggaatgaaaatatgagtttttattgtttttgttttgttttttaataaaaggtgttgttttaatggaaaatatttttgtagatttttttaattttagtattattttttttttttatagggatatgtaattttgttttttttaaattaggatgttgagatgaaatgttaatttgtatgttaatgttgttttgagaatgaaaaggtatggtattaatggaattatttagaggattagtttttgagtatttgatgattaatggtatttttttatattttgatagatgaaattatatataataggttgttttttgtaaggttagagttggagtgttttaattaataaaatgttttatttaatatttggattattaataaggatatatttaattataaaagtatattgaagatagtattttttttttgataatttagaagatattttatgttttaatttagaaaatattttttgtggttattattgtatagttagtattgtattttatatgtgattatatattagttgtttaagttttgtttgagaaaagtttttagaatttagtttttaattggtagttaatattttagaagggaatgattggttagtgttgttttataaagaaaaaaaggtaaaattttagtgtaaaataatttaaaatgtgttggtaaaagttttgtatttttaaggatatgggtaagtgaatgggtaaaagttatattatgtggatattagttggttgggaaaatattgggaattttaaagtaaaagattaaatatgatagtattagataataggatgtgataaaattttggttttaggatattaaaaaagaatgatagtgaaatatttgggtattgttaaaaaaaagaattattaagatttttttatatatattatagtgttattagttataataaaaaagtggaaaaaatatgatttttaattatatgaaatataattttaaaaaatttgtaatgattgttatagttttgt

SEQ ID NO: 122 - DNA, 2501 bp, Artificial Sequence
  chemically treated genomic DNA (Homo sapiens)
gtttaagtttttttttttggatatttttagttttaaagaatagttataaggttatttattggttgaggaagttattggagaatgggagttttggaatttggttgttgagtgatagtatttttgaattatgtgttttttgtttgttttagttttttttttattttttattttagggaggatgtagggattggttagaatggaggaagagttggaaagatttgtgggttttagttttttattgtaggttgaaggtgggtagtggagtatatagttttgttttttttaaagtatggttagtttagattgattttttttatttggtttttaaagtttagtatttttttaaagttatttattttttttggttttgtggtttggattaagtttatttttattttgtaatttatttttttatttttttttttttttttttaaattttagaaaatatatatggtggggaagttaaggaaatttttattggtttttttttttttttgttgttttgtgttaaagttagaatggaatagttagttttttttttttttagttttttgtttttttttatattgattttggttggaattatttattttattgtttttttgtatttaaatttttttgttattatttttttttgttattttttattttagttttttttttgttttgttagtatggagagtgagggaggtttttaaaaatgtatattttgtttagatgaaaggaaaaggttggggtgggattggtggatttattgtggatttgttgggtttatgtggtgtggtgtttggagattgtgattttttgagggtttaaagattaaaatgggatggattgaggtgtgtgttgtgtgtattatggagggttggtttttgtttggtttggtgggtgtagatgaatatatgtggggaattattgttaaatttagtattgtgttttataaaaaagttgagtttattgtttatgggaaattttgttttgaggtaggtaaaaatgttattatgggttgtattaggagaatatgggtttttttagtttttttagaatgaggaagttttttaatgtttttataggaattattttgaaaagttaatgtaaatttttgaaagaaaggaagaaagaaaaaaataaagaaaaagaatagatttatatgtttatatatgattatatggagttttgtagataaatatgagtttattttttttttttagtttatttttttttatagaggttgttgtgttatttataaattgaattaaatgagggttgaaatggtatgttttagtatgtattgtagttattgtggaagaataagtttttttaatattggggtatgtattgatttttaaaaaatgtttgtttggggaatgaaatatgtatatgtattttatatttatagatttgtttttgaaaatttttttatttaatattatttaattatgaatttgttttgtttttagaggaatggaatgtattttagtttttataaatttggggagagataatattttgtttaggtaagaggagaggaagtttaggggtttagttgtttatattgttggttagaggaggagatagatttgggagaggttttggagtgttttgtttttttttttttttttttgattaatttattttgggaaattttaatagtgttattgattgttatattttgggttgtattttttagtgtttattttttttgattttaggttagggttggatgtgaaagttgggtttttgtttggttttggtgtatgttttttttgtttatttgtttgtttttttttttttaattttatttgttttttttttttttttatataaatatttttttttttttttttttttttgttttttttttttttttttttttgtttatttaatttgttttaaaaagaaaattatttaaagggggggggtgtttttttagttttttgtatttttgttgttgttatttttgaagttgagtttttgttagagattttgaggtttttagtttttttaaatagatagatatatattttttttttaaatgagatgaaatgagtggtgttttggggtggagggaggtgttggttggagttggggttgggggtgggagggggtgagggaaaggttggggggggatgtattatttaatgttgttgttgttgaaggtgtggtattgaaagtttttgttaatgtattttatgtttggtagttttattttgtatttgtttatgtattagtagatgttatgtttgtggttatgggaaggtttgtattggggtgagtagagtaataggtggtgaggatggttgtattttagggttttgtttttttttgttttgttttttgtttattttaaggtaagatttttatttttagagagttgagggtattagatttgatttttgggtttttggtgtttttattttatggaaagatttagggaaaatgtgaatttaggtagtttatttttggtaagtttttttaattttttttttttttttttttt

SEQ ID NO: 123 - DNA, 2501 bp, Artificial Sequence
  chemically treated genomic DNA (Homo sapiens)
aaaaaaaaggaaagaaagggattgaaggagtttgttaagggtaggttgtttaaatttatattttttttgggtttttttgtgaaatggggatattagaaatttaagggttgggtttagtgtttttaattttttggggatgagagttttgttttggggtagataagaggtagggtagggaggagtagagttttggggtgtggttgtttttattgtttgttgttttatttattttagtgtaaatttttttgtggttgtaaatgtggtatttgttggtgtgtggataagtatgggatgaagttgttaggtatggagtatgttgatggggatttttagtgttatatttttgatagtagtaatgttgagtgatgtgtttttttttaattttttttttatttttttttatttttagttttgattttagttagtgtttttttttattttaggatgttatttattttattttatttaagggaaaaatatatatttatttatttgaggaaattgaggattttggaatttttagtaagggtttaattttgaaaatggtaataatagagatgtaaaaagttaaaaagatattttttttttttaaatggttttttttttgaggtaagttggatgaatagagaagggaagagaggaagaatgagaggaagagaagggaaggaagtgtttgtgtagaagagagagaaagatgaatagagttaggaaaaggaagataagtaggtgggtaggaaggatatgtattgagattaggtaggggtttaatttttatgtttagttttggtttggggttgggagaggtgggtgttagaagatgtagtttaggatgtggtaattaatgatattattggggttttttaggatggattggttagggggagaaaggaaaaggtaaaatattttaggattttttttggatttgtttttttttttagttagtagtatggatagttggatttttgaattttttttttttttatttgggtagagtgttgtttttttttaaatttataaaaattaaaatgtattttatttttttgaaagtaaaataaatttataattgagtgatattaaatagagaggtttttggaagtagatttgtgaatatgaaatatatgtgtatattttattttttaggtagatattttttagaaattaatatatgttttaatattggaaagatttgtttttttatggtgattatagtatatgttgaagtgtgttgttttagtttttatttaatttaatttgtaagtagtgtagtagtttttgtgggggaggataggttgaaaaaaaaaagtgggtttgtatttatttataggattttatatagttatatataggtatataaatttattttttttttttgttttttttttttttttttttttttaaaggtttgtattaattttttaaagtagtttttataggggtattgaggagtttttttattttgggaaaattgagaaaatttatatttttttaatataatttgtaatagtatttttgtttgttttgaggtagagttttttgtgagtaataaatttagtttttttgtggggtatagtattggatttgatagtgattttttatgtgtgtttatttgtatttattgagttaggtagaggttagttttttgtggtgtatatagtatgtgttttagtttattttattttagtttttaaatttttaggaagttatagtttttggatattatattatatgagtttaataggtttatgatggatttattagttttattttagttttttttttttatttgaatagaatgtgtatttttggaagttttttttattttttatgttggtagagtaggagggagattgaagtaagagatggtagagggagatggtggtaaaaaggtttagatgtaggagaatagtaagatggatggttttggttagagttgatgtggggaggaatagagggttgaagggagagggggttgattgttttattttagttttggtataaagtagtagaaagggggaaaagttaatagaaatttttttagtttttttattatatgtattttttaggatttgagaggaaagagaggaaaatgggggaatgggttgtaaaatagaaatgagtttaatttaggttgtagagttagggaaggtgagtaattttaggagggtgttagattttagaagttagataggaagaattagtttaaattggttatgttttggaagggataagattatgtgttttgttgtttatttttagtttgtaatgagggattgaggtttatgagtttttttagttttttttttattttggttagtttttgtattttttttggggtggaggatggaaggaaagttgggataagtagggaatgtatgatttagggatgttgttatttggtagttagattttgaaatttttattttttaatgatttttttaattaatgggtggttttgtgattgttttttaaggttgaagatatttaggaaagggggtttggat

SEQ ID NO: 124 - DNA, 4001 bp, Artificial Sequence
  chemically treated genomic DNA (Homo sapiens)
tttttttattagttttggtgaaatgggtggttgtgttgaggagattttttttgtaaggaattgaaggtggttttagttgatagttaatgagaaatggagggtttttgttttatagggaataaagaattgatgttattaataattatatagatttggaggtagattttttttttattgagtttggggatgagattagagttttggatgatatattgatggtagtttttagatgaaattttgagtagaggatttagtttagttgtgtttagatttttaatttataaaattttgagattataaatatgtattgttttagttgttaaatttgtgggaatagtgtagaagtttttttttgtttttggagtatggtaaggtttaggttattgttttatgattatgaaaaattaggtatatggatatggagagtgagtagggtagagtagaatttattgggaaaaaggaaagtttttagtaaagataggggttttgaaagtaggttgttagtaaggtgtttgtgttttgtgttttttatgtggtagaagttgggaagttttttgtgggttttgtttagatgagagaagtaatattttttttttggggtattatagttgtgtatgtttaagttttgttaaagggattttattttggttattatttatgagtgtttaagtaaaatttatgggggtgttaaaattataatgttaatgttatgtttaatgatattataatgagttgggttaaattagggatatttaggttgatttattgtgtttgtattaaagttgggatggttatttttgagtaatattttagtttaagggtaattttttttgttttttttattaattgtagaggtagtataggtattgttttgttgttgtttttgtgaatatagtttttttttatttttttttttgagattttttttttttatgtgtttatttattttttaattatttttttttttaatagtgttatatagtaataaataatgtattttttttttgatttttggttatattattgatttagttttaggggtatttttaatttttttgttttgttttaaatatataagggtagagtatattgtttttttatattatggaaattatattaatagttattagattgaaaaatttttgagttttatattttttttggttaaaggtttttttatgtttaagatattggtttgaatatttaatttttgtttatagggggtggtaaaatatggtagttgaattgtttgtttagtattttttgtttgtattattttttttgatattattgggtatttttgttatttgggttttttgattattattagagagatttttggtttttggtttataggggatggtaatttggtttataggtttatttttgaagattatttagattttgttttgtgaaaggagagtggtgttaagttatttttataggagttagtgttttttaagtttgtttttttttttaaaaattagtttttattatataagtaatgtatgagtatatttttttagttagaaaagtaagttttagttttaatttggaaatgttttttaatttttattatggagtttgggtttttattttatttgtttgtagtaagattgttatgagtttggtgtttttttttagatttttttttatgtttggagattttttttatttttttaagagatagggttttgtttagttatttagattggagtgtagtggtaagaatatagtttattgtagttttaaatttttgggtttaagtgatttttttattttagttttttgggtagttgggattatgtatgagtaattgtgtatagttaattaaaaaaaatttttgggagataggggttttattatgttgtttaggttggttttaaatttttggttttaattgatttttttattttagtttttgaaggtgttgttattatagttgtgagtaattatatttggtttgttttggggatttttgtatgttagtttatatagtttagttttatttttttgttgttatatggtattttatagtattgataggtatttatatggtttttatttatttgttattatagataatgttatagtgaatattttagtatatgtttttttgaatgttttttttttttttttttttttttttttgagatagagttttgttttgtagttaggttggagtgtagtggtgtgattttggtttattgtaatttttgttttttaggtttaagtaatttttttgttttagttttttgagtagttgggattataggtatatgttattatgtttagttaatttttgtatttttagtagaaatggggttttattatgttggttaggatggttttgattttttgattttgtgatttgtttattttagttttttaaagtgttgggattataggtgtgagttattaagtttggttatggatgagtttttatagtatggaattgttgggttataggatatgatttaaattttataattgttttttaaagtagttatattaatttataatttgattagtaggaaatgtatattatttttttaagttttgttaatattttagaaattttttatttattggatagaaggaaatatggttttttattgttgtaattgataattttttatattataaatattttttagatatttttggttatatttttattttataaattgtttatggattttgtttatttttaaaaatttagttgttttaatgatttataggtttttatataatttttatattagtgttttttgttttatttgttatttatttgtgggtgttttaggaaaagttgtagaatttgattttatttaattggtaaattttttttttgtgattgttattattttaaaaagtaaaagaataaagaatggttattttataggtagagtagtttatggtttttttttttttatgtttttaaagaaattttttttattttgtggttataaaaatttttatatttttattaatattttaatagttttgtgtttaatgttgggttttaaattttagattaattttagtgaatagtgttaagtggggttttattatttttaatgagtaagtaattgttttaattttattggttagtttattagtttgaaatattgtttttattatattaaatttttatgtgtatataggatggtttttgaattttggttaagtttattagtattatagttttatttgtgttatttttatttagtttttatagggattttagttttatttaatatatttgttttttttaattgtgtaattttgttttttttagtatttatttttagggtttgggtatgaatttatagtttttgaatttagttggggagtagggaaatgttagtattgtagtgatttaatttatattttgatgattttttatatatttttttttttttttagtttttatatttaagagaaatttagttggatattagtaatataagtgttatttattgaaaagagtaaagtaagagtgttgattttttatggataggatgaaataaaataagttttgtaagtttgttttttgtttagtatataggtttgttgttttattgggttattttgttgttgatgggtattttgtagaattgattagattgtaagtaggtagtgattttttttaaagtttgaaaggaaaatatattaaattttataatgattttaatttagtttaatagatgtatattagaatagtaatatttatgtgttgtttgtgtttattttttttatttttttgtagatagtgtttttaaggtatagaagttaggttttttttaagatttaaaggtttagaggtgtttaattattgattttattaggtaaaagttggggaagaattttttattatgggattttgtaggttttaggggagtttgtgagtgtttttataagagaaaggtgtaggaaatgttattttaaaatggtatatgaaagtttttaggtttgggaatttatttaggtatttgggg

SEQ ID NO: 125 - DNA, 4001 bp, Artificial Sequence
  chemically treated genomic DNA (Homo sapiens)
ttttaagtgtttggatgagtttttaaatttgaaggtttttatgtgttgttttgaggtgatgttttttgtattttttttttataaaaatatttataggtttttttgggatttgtaggattttatagtggaggatttttttttggtttttgtttaatgggattaatggttggatatttttagatttttaagttttgggaagagtttaatttttatattttggaggtattgtttataaaaaaatggaggaggtagatgtaggtaatatgtgaatgttgttgttttggtatgtatttgttggattgggttggggttgttataagatttggtgtattttttttttaggttttggagaaaattgttgtttatttatagtttgattagttttgtaagatgtttattaataataagatggtttagtggggtaataagtttgtatgttgagtaggaggtagatttgtagagtttgttttgttttattttgtttgtaaggggttagtgtttttgttttgttttttttaatgaatagtatttatgttattggtgtttagttgagttttttttgggtataaaggttaaaagggaaaaaggatatgtggagaattattaagatatgaattgaattgttgtgatattggtatttttttattttttaattgagtttaagggttgtaggtttatgtttaagttttgagagtgggtattagaaaaaatgagattgtatagttggagagagtaggtgtgttaaatgggattggagtttttgtgaagattgggtgaggataatataagtaaaattgtggtattgatggatttaattggagtttggaaattgttttgtgtatatatgggagtttagtgtgataaaggtagtattttagattggtgggttagttaatagagttgggataattgtttatttattaaaaataatagagttttatttgatattatttattaaaattaatttggaatttaaggtttaatattaaatataaagttgttgaaatattgatgaaaatgtaagaatttttgtgattatggggtaggagaagtttttttaaagatgtaaaaagaaaaaaattataggttgttttgtttgtggagtagttattttttatttttttattttttaaaataataataattataaaggaaagatttgttaattgaataggattaaattttataattttttttaaggtatttataaataaatgataagtgagataaaaagtattagtataaagattatataaagatttataaattattaagataattgagtttttaaaaatggataaaatttatgaataatttataaaatagaaatatagttaaaaatgtttaaaagatgtttatgatgtaaggaattattaattataatagtgagaaattatatttttttttatttgatgagtaaaaagtttttaaagtgttggtaaggtttaggaaagtgatatgtattttttgttggttaagttgtaaattagtatagttattttggaggataattgtaaaatttaaattatattttatgatttagtaattttatgttataaaaatttatttatggttgggtttggtggtttatgtttgtaattttagtattttgggaggttgaggtgggtagattatgaggttaagagattgagattattttggttaatatgatgaaattttgtttttattaaaaatataaaaattagttgggtatggtggtatgtgtttatagttttagttatttaggaggttgaggtaggagaattgtttgaatttgggaggtagaggttgtagtgagttgagattatgttattgtattttagtttggttatagggtgagattttgttttaaaaaaaaaaaaaaaaaaaaaaaaaaaatatttaaagagatatatattaagatgtttattgtggtattgtttgtaatgataaataagtggaaattgtgtaaatatttgttaatattatggagtattatgtggtaatggaagaatgagattgaattgtgtgaattaatatgtaaagatttttaaaataggttaggtgtggttgtttatagttgtaataataatatttttagaggttgaggtgagaggattagttgaggttaggagtttaagattagtttgggtaatatagtgagatttttgttttttaaaaattttttttaattagttgtgtgtaattgtttatgtatagttttagttatttaggaggttgaggtgggaggattatttgagtttaggaatttgaagttgtagtgagttgtgtttttgttattgtattttaatttgggtgattgagtaagattttgttttttaaaaaaataaaaaagatttttaagtatagagaagagtttggagggaaatattaaatttataatagttttattgtaggtaagtgggataaaggtttagattttatggtggaagttaaagggtatttttaagttaaggttaagatttgtttttttaattaagagaatgtgtttatgtattgtttgtgtagtagaaattagtttttagaaaagaaagtaaatttaagaaatattgatttttgtggagatgatttggtattattttttttttatagagtagagtttgaatagtttttagagataggtttgtgggttagattgttattttttatggattagaagttaaggatttttttagtgatggttagagggtttaaatggtagggatatttagtgatgttaggaggaatagtatagatagaaggtgttaagtagataatttaattgttatgttttgttattttttgtgagtagggattaggtgtttaggttagtattttgggtatgggggagtttttggttagaagaggtataaagtttagaagttttttagtttgataattattgatataatttttatagtgtgagggagtggtatgttttatttttgtgtatttaaggtaggatagagaaattgaggatgtttttggggttagattgatgatatgattagaaattaaaaagggaatgtattatttattgttgtgtaatattgttaagagaggaggtagttaagggatggataggtatatagagagggaaggttttaggagaagggatagaaaggaattatgtttataagaataatggtaagatagtgtttatattgtttttatagttaataggaaaaatggaagaagttatttttaagttaggatgttgtttagaagtgattattttaattttggtgtgggtataataaattagtttaaatgtttttaatttaatttagtttattataatgttattaaatatgatattagtattgtggttttagtatttttatgggttttgtttaggtatttatgggtaataattaagatggagtttttttggtaaaatttaggtatgtatagttgtagtattttaagaagaaaatgttattttttttatttgggtaaaatttatagaagattttttagtttttgttatataaaagatatagaatatagatgttttattggtaatttgtttttaagatttttgtttttgttgagagttttttttttttttaataaattttattttgttttatttattttttatgtttatgtgtttaattttttgtggttatgggataatagtttgaattttgttatattttaggggtaaaagaagatttttatattatttttataaatttagtagttaaaataatatatgtttatggttttaaagttttgtggattaggagtttgggtatagttgaattgggttttttgtttagggttttatttgaaaattgttattagtgtgttatttagagttttgattttatttttaggtttagtgggagaaggatttgtttttaagtttgtgtaattgttgatagtgttagttttttgttttttgtgggatagaggttttttattttttattggttgttggttagagttatttttagttttttgtaaaagggatttttttaatatggttatttattttattaaagttagtaaaggag

SEQ ID NO: 126 - DNA, 4001 bp, Artificial Sequence
  chemically treated genomic DNA (Homo sapiens)
gtttgggtgtgaggattttaaaggttttttaggtggttaggtatggtggtttatgtttgtaattttagtatattgggaggttgagataggaggattgtttgagtgtaggagtttgagattagtttgggtaatatggtaagattttatttttatgaaaaaaaatttaaaaattagttttgtacggtggtgtatatttgtagttttagttatttgggaggttgaggtgggaggattatttgagtgtaggaggttgaggttgtagtgagtcgtgattgtgtcgttgtattttagtttaggtaatagagagagattttgttttaaaagaaaaaaattaaaaagaaagttttttagattattttaatgtgtagttatgattgagaattattgttagttgttaatagtgtttggtagatttgattggggggaggaggagggagaaaatataggaatttaataaagttgtagaatatatgattttgttttttttagtatttttttttggttttgtttaatttttttttttttatttttattatttatattttataaaagttattagttatttgttatttagttttagttttttttgatttttttttggaaatatgtttatttttttttttgttagtattttgtgtgttttgacgaataaaatgtttataattatataaagggatataattataattaaatagttataattttaaaatttttttaattttttaaatttatttttgaaaagtgttttggtgatttttttttaatttaggtatttgtaaaagtttgagattgtagattgaattattgttaataaatattatatttaaaaaaaattgatagattgtgttttttgtattttttgtaatatttattagaattgttattgaaatatattttttaaatttatgtttttggaattggaataatttttgttatattttgttttgattttataatatttgttgttgtttataatttagattttttgaaatttcgtcgtttgttttttattgttttcggaagtgaatgagaggaattttaagagttggatttggtaggatgggatatggtgaagagttttatgaagaatgattttttaaagggtttagttttttttgttatgttatttttgtagttgttgattaaatagaaattttggaataatttttttgttttattggttatggatattgaaacgaaaaagtgttttatttttgtgttttattaattttattttttttatataatggttttaggtaaattacgtagtgtttgtttttattattttttttttttttttttttttggaggaggggaggttaggttttaatgttttagttttcgggcgtcgttatttcgcgtttgttaggttcggcggttatgtcgtttattcgggtggcggttagtttgttttattagggtttttcgcggaggtcgtttcgtcgttttcgagtattagttttacgtttagttttagttgttcggtgtagaagtttacggcggcgtatatttagagcgggttggtggcgagtatagcgttcgtagttgcgttttttagcgttagttgtatgggttttcgtagcgttgttaggtttcgtaggcgttgttttatatcgtatataggtcgtttagtaggaagaagttatatgttgtttcgtgatttatgttattttgtatgaaggagataatttcgatgttttatgttaggaggttattgtggaattaggagaagaaagttgtttcgtgcgtttttcggagaggagtttggcgtttgtacggtttagttcggatataggtggcggcgaagtttcgttgtgggggtcgtggtcgggggcgaaggatttttgggcgttttcgtttcggggttattgaggtagtagtagcgattttcggaagcggagattgtttttattgtttttatgttggtaaatgagatttggttgaaaggaacgataggaatagttttgaaggtggaggaaagttttttgaggtagtatggtagatgagttggaggatgtagatggaaagttgagatgggagtagttaattttttttttatggatttagtgtttttttttcgttttttttaaataatattagggttgttatttttttttttattttggtttcggttttttgtagataggtgagtttggagattaggttttaaaatagtggttatagtttttgatagtttatagtgcggagtttaagtagttatttaagattgtatttttggaaatgattttattgtgtattatttttggttttaagattatttttgtttgattgaatagtaagggttttaaagtttattgatttattaaagtattgattaaagtagtgatttttaatattgggtgtgcgttagagttatttggtggagtttttaaaggtataaatatgagttttttttgatattatgatttatttggtttagagtggagtttgtattttgttatatttagtattttttaggtaatattagtgtgtggttagggttgagaatttttgtatttaagagttaggagatatagtgttaagtttaattttgttattgattttgtgaattttgagttttattttttaatttgtaaagtcgagcgtgggtaaatgaggtaatacgcgtttgttttttatttacgtttatgtttttttttagattttaatattttgatggaagattattttttatatattgttttttttttattgtagttagatataatgagatttggttttttttatttttgtggtttttgaagatttggattgtatttttttttttggttataatttaaaagatttttaaaatttattgatggtttttttgttagtgagttaggtaatattttagggttttgaattttatatattttataattttaaaattttattttagttgttgttttgttattttggtattggttattatatagtgtagtattttgttttaagtttgtggtattggaattttattagtttgtttttattttttgtaggagaaatatttgaattaaaagttgaatttaataatgaaaagaaagaaaagagaaaggaggttgtgaagaaagtgattgttgttatgatcgtggggaaggatgttaggtaagagtaattatttttgttattgattattttagaggtttatattttattttatggtttttattgttttttttttaaaagtattataattatagaatttttaagaatgggtttgttttattaaaaatattattaggaagtgtagttgtttttgtattaatgttttattttttgtttgtttgtttgttatggggtgtgtgtgtgtttgtgttagaatagtgaaacgagtttgattttattgtatttagatttagtataatattttttgagagttggtatagttataaatttttttgttgaggtcgttttagaagatgataaaaatatattgagaagtataagtttatatgatttttaattggtttaagttattgtttttaattttataattgtatatttaattgttggatttaagatgaaaattaatgttaattaaatttatgtagttttattttttatttttgtaattaagattatttggaaataagtaaggattatatgtaggtttttaaggattattttaagattttttcggggggttcgtgaggttaaagttgtttttataataatatttagatgttatttgttttttttattatttggatgtttatagtgatggtgtaaagtagtggtgggtaaaattgttggtgttttagtatgaatgaaggtagtggtgttaattataatggtagttattgtattttttaatattatgtgttaaaaaagagtagttttatttaggaatgttttttatgagtagtaaaaatttgttttattaaaatttgaatttttttaatattgtgtttgatgaaatagggattatttataaattttttttgttgcgtagtagtgtaatggtcgatttgagaaaaaatttttgtgtagttgtttga

SEQ ID NO: 127 - DNA, 4001 bp, Artificial Sequence
  chemically treated genomic DNA (Homo sapiens)
ttaaataattgtataagggtttttttttaagtcgattattgtattgttacgtagtagaagagatttatgggtaatttttattttattaaatataatattaaaaaggtttaagttttaataaaataaatttttattgtttatgaaggatatttttaagtgaaattgtttttttttagtatatggtgttaaggaatataatgattattattatggttggtattattgtttttatttatgttgaggtattagtagttttatttattattgttttgtattattattgtaaatatttaaatagtgaaaaaggtaagtaatatttaagtattattatgaaaatagttttgattttacggatttttcgaaagggttttaggataatttttaggggtttgtatatagtttttatttatttttaaatggttttaattatagaaataaaaaataagattatatggatttggttaatattgatttttattttgaatttagtaattgaatgtatagttgtaaagttgagggtagtggtttgagttagttaaagattatgtgaatttatgttttttagtgtatttttattattttttaaaacgattttagtaaaaagatttgtaattgtgttagtttttaggaggtgttatgttagatttgaatgtaatgaaattaaattcgttttattgttttaatataaatatatatatattttataataaataaataaataaaaagtagagtattaatataaaggtaattgtattttttaatgatgtttttagtgggataaatttatttttagaggttttatgattatgatatttttaaaggaaaagtagtaaaggttataagatggggtatggatttttgaagtgattaatggtaagggtgattatttttatttaatatttttttttacggttatagtagtaattattttttttatagtttttttttttttttttttttttttattgttgagtttagtttttagtttaaatattttttttgtaagagatgagagtaaattggtaaggttttagtattatagatttagagtagaatattatattatgtaataattaatattaggatagtagggtagtaattaaaataagattttaaaattatagaatatataaaatttaaagttttagaatattatttgatttattgataaggaagttattagtaagttttaaaaattttttaaattatggttagagaggaaggtgtaatttagatttttaagaattataagagtgggaaaaattaaattttattatatttagttataatggggagagaatagtatatgaaggatgattttttattagaatgttaaagtttggaggagaatataaacgtaggtagggagtaggcgcgtattattttatttatttacgttcggttttatagattaagaaatgaggtttaaagtttatagagttagtgataaagttgggtttagtattgtgttttttgatttttgaatgtaaaggtttttagttttggttatatattaatattatttgagaaatattaaatatagtaaagtataggttttattttgggttaaataaattataatgttaaagagaatttatatttatatttttaagagttttattaagtgattttaacgtatatttaatgttgagaattattattttaattagtattttaataaattagtgggttttaaggtttttgttatttaattaaataagaataattttgaaattaagaatggtatataatggagttatttttaaaggtataattttgaatgattgtttaggtttcgtattgtaaattgttagggattgtaattattattttaaggtttggtttttaggtttatttatttgtaagaagtcggaattaaaataaaaaagaaagtaataattttaatattgtttaaaagaaacggaaaaaaaatattaagtttatgaaaaagaggttgattatttttattttaattttttatttatattttttagtttatttattatattgttttaaaagatttttttttatttttaagattgtttttgtcgttttttttaattagattttatttattagtatagaaatagtggggatagttttcgttttcggaggtcgttattgttgttttagtggtttcggagcgggggcgtttaggggtttttcgttttcggttacggtttttataacggggtttcgtcgttatttgtgttcgagttggatcgtgtaggcgttaggttttttttcgaaaggcgtacgagatagttttttttttttggttttataatggttttttggtatagggtatcggggttattttttttatgtagagtgatatggattacgaagtagtatatggtttttttttgttgggcggtttgtgtgcggtgtggggtagcgtttgcggggtttggtagcgttgcgggggtttatgtagttgacgttagggggcgtagttgcgggcgttgtattcgttattagttcgttttgggtgtgcgtcgtcgtgggtttttatatcgggtagttggagttggacgtgaagttggtgttcgagggcgacggggcggttttcgcggaaggttttgatgaggtaggttggtcgttattcgagtgagcgatatggtcgtcgggtttggtaggcgcgggatgacggcgttcgaggattgggatattaaaatttgatttttttttttttaaaaaaaaaaaaaagaaagaaatagtggggataaatattacgtgatttgtttgaaattattatgtggaaaggatgaaattagtaagatatagaagtagagtattttttcgttttaatatttatggttaataaggtaaaaaaattgttttaaaatttttatttaattaatagttataaaagtagtatagtaagaaaagttgggttttttaaagagttattttttataggattttttattatgttttattttgttaaatttagtttttagagttttttttatttattttcgggaatagtgaaggataaacggcggggttttagaaagtttgaattgtgaatagtagtaggtgttatagaattaaagtaggatgtaatagaaattattttaattttaaaagtataaatttaaagaatatgttttagtggtagttttggtgggtgttgtaggaagtatagggaatataatttattaattttttttaagtatgatgtttattagtagtgatttaatttgtagttttaaatttttataaatgtttgaattaaaaaaaggttattaggatattttttaagagtaggtttgaagaattaggagagttttaaaattataattatttaattgtaattgtatttttttatataattatagatattttgttcgttaaagtatataaaatgttaatagaagaagaaataaatatatttttaaaagaaaattagaaaaagttgagattgaatgataagtggttaatggtttttgtgaggtgtaagtaataaaaataaggaggaaaaagttgggtaggattaaagaggggtattaaaagaggtaaagttatatattttataattttattaaatttttatattttttttttttttttttttttaattaaatttattaagtattgttagtagttagtagtagtttttaattatggttgtatattaaaataatttggggagttttttttttaattttttttttttgagatagggtttttttttgttgtttaggttggggtatagcggtataattacgatttattgtagttttaattttttgtatttaagtgatttttttattttagttttttaaatagttgggattataggtgtgtattatcgtatagggttaatttttaaatttttttttatagagatagggttttattatgttgtttaggttggttttaaatttttgtatttaaataatttttttgttttagttttttaatgtgttgggattataggtataagttattatgtttggttatttggagaatttttaaaatttttatatttagat

SEQ ID NO: 128 - DNA, 4001 bp, Artificial Sequence
  chemically treated genomic DNA (Homo sapiens)
tttgtgtaagtatattttatgattgtataatgataaaatcgtttaataatatatttcgtagagtatatttttattgttaagtatgggaattgtataatgtttttattatatatatatgattatataataagggttatatgataagttagagttattatggtattataaaatgttttttaaaaaattagttaagtggtagggtgcggtggtttacgtttgtaattttagtattttgggcgtggtggtatacgtttgtagttttagttatttggaaggttgaggtaggggaatcgtttgaattcgggaggtagaggttgtagtgagtggtggtcgtattattgtattttagtttggtgataaagtaagattttattttaaaaaaaaaaaaaaaaaaaattagttaagtgtgatggtatatttttgttagttttagttatttaggaggttgaagtgggaggattgtatgagtttagtagtttaaggttgtagttagttgtgattgtattattatattttagtttagataatagtgtaagattcggttgtggggcggggttaatatatatatatatatatatatatatatatatataatatagaatttattattttaattagttttaagtgtatagtttagtggcgttaagtacgtttatagtgttgtgtaattattattattatttatatttagaattttttatttttttaaattaaaattttttatttattaaatattaattttttattttttttttatttattggtaattattattttattttttgtttttatgagtttcgttattttaggtattttatatagtatttgtttttttttttttttttttttggagatagagttttgttttattgtttaggttggagtgtagtggtataattttagtttattgtaattttttttttttaggtttaagtaatttttttgttttagtttttcgagtagttgggattataggttcgtgttattacgttcggttaattttttgtatttttagtagaagcgggtttttattaggttagtcgggatggtttcgattttttgattttatgatttattggttttagttttttaaagtgttgggattatataggtatgagttattatattcggttttgttttttttttttttttttttttttgagagaggtgttattttgtcgtttaggttggagtgtagtgttataattatggtttagtttagttttaattttttggattcgagcgatttttttattttagttttttgagtagttggggcgataggtatatatttgtacgttcgggttaatttgtgtgtgtgtgtatttttggtagaggtggggttttttttttttttttttttttttttttttttttttttttttttttttttttttttttttgagatagagttttatttttgtcgtttaggttggagtgtcgtggtatgatttcggtttattgtaattttcgttttttaggtttaagtaattttgttttagttttttgagtagttgggattataggcgtgagttatagtatttggtaaatttttatatttttagtagagacggggtatcgttatgttggttatgttggttttgaatttttgatttcgggtgatttgtttgtttcggttttttagagtgttgggtttataggcgtgagttattacgttcggtaagatggagtttcgttatgttggttaggttggattcgaattcgaatttagtggtttcgaataatttggttttttaaagcgttgggattataggtatgaattatcgtattttagtttagtatttgttttttggtggattgttttattttatttagtataacgtttttaaggtttatttatgttgtagtaggtgttagaatttttttttttttaaaggttgaataatattgtggtatatattttattttgtttattcgtttatttgttggtgtgtatttaggttgtttttgttttcgggttgttgtgaagaatgtcgttattaatatgggtgtgagaatatttgtttaagtttttggttatatttaaatttttttggatatttagttagaagtggaattattggattatttggtaattttatttttgattttttgaggaattattaatattattttttatagtagtcgtagtattttatatttttattagtaatgtataagggttttatgaaattattaattttataatattttttttgattatatgtttattgtagaatatttagaaaatgtaagaaataaaatttagaaaattaaaattttttttattttatatatcgggatatgatttgaatttttattatttttaataaagggaagagagtatttttttgggacgattgcgttgttatagtgtcgaggtttgttttgttcggattttatttttaaagtttcgtcgatttcgtcgttttcgcgattttaagcgttagtaaagtttatgtagttgaattggattttgagtatatttgtggatagtttttgggagagtcgtagatacgatacggggttgttatattttttatgggtttgtttttttatttttaaaagttatttttgcgttgttaaggtaaagtataaaatgtttgaggaaagcgatttttttagaaagtacgttttataaatatattatttacgttttaaattgagtttcggtgttttgattggagggtatttgaggacgttagtacggtttcgtaaagattagtaattagattggtaagtagggggtaggagaatttttcgttttatttttttagttgtttattggttgattttattattagttttttttgtttttttattatcgtcgttatatttgtgtttcggtgtatatttttattggttttatttgtagtcgttttacgtaaggggcgttttagagttagttattgggagtcgttggattcgggttttaaaaaacgtcggtcgtgaagtgggcggagcgagcgatttgaacgcgagcggcgcggatttttgttaagtatcggtttatgtgaggttcgcggtatagcgttttttgggttttttagaagttagtttttcgttttcggattcggtagttcgagtaggagtcgtgggatcgggcgttagtattttttgcggcgtgttatgggttcgcgtcgtcggagtcgaaagttcgaggtttcgaggaggcgtagttcgagttcgatttcgattttcggtttttttcggcggggtttttttttaggtaatcggtcgcggttttatttcgaagaggagaaaatcgaggttcgtaggcggagttcggatttttcgagtttcgatttcgtggtatttttttgttgggggataacgcggtttcgtcgttcggtattcgtttcgggtacgggcggtgttagttttgcgaggggttggagtaggcggtttcgaaagcgggaagggatcggtttagttatttggtttttaacgtcgtttttttgttaggattagtggttatttagcgtttatcgtttatcgttaattaggtattgttttttattgttcgtgcgttattttagttttatattgtgtttattttatagttaatgagaaagtcgaggtataggttagagagtttgagtagagttatataatttggtgttttggcggatacgggatttttaattttttgtgtttgtgtatttttaaattgtaaaagtattgattgttttcggtgacgattttaaataggagtttttttaggaggtgttttttaggggttttttttttttttcgggagaggttgttaggttttgaatcgaggttttttgcgttgtttattttgttgttttttagagtttgtgttcgggaaaaggggtcgaagtttgtgttttaattgtttatggtgggttggtggatgggagatttaacggtaggaggaggtagatgtttgtatggtatatggtggtaatagttgttttatttattttttaatttttgttacgtagttatgaggaagatgggaagtgtattgtagttta

SEQ ID NO: 129 - DNA, 4001 bp, Artificial Sequence
  chemically treated genomic DNA (Homo sapiens)
taaattataatatattttttattttttttatagttacgtagtaagagttaagagataagtaaagtagttgttgttattatgtattatataggtatttgtttttttttgtcgttgggttttttatttattagtttattatagataattaagatatagatttcggttttttttttcggatataagttttggaaggtaatagagtgagtagcgtagagggtttcggtttaaggtttaatagtttttttcggaagggaaaaaaaatttttgaaagatattttttaagaggatttttgtttgaaatcgttatcgaaagtagttaatatttttgtaatttaaaaatgtataaatatagaggattggaaatttcgtgttcgttagaatattaagttgtgtgattttgtttaagttttttggtttgtgtttcggtttttttattagttgtaaaatgggtataatatgaagttgagataacgtacgaatagtgggaggtaatgtttggttggcggtgggcggtgggcgttgggtaattattagttttaataagaagacggcgttaggagttaagtggttaagtcggttttttttcgttttcggaatcgtttgttttagtttttcgtagggttggtatcgttcgtgttcggagcggatgtcggacggcggaatcgcgttgttttttaatagggaagtgttacgggatcgggattcgggagattcgggtttcgtttgcgagtttcggttttttttttttcgagatggggtcgcggtcggttatttaaggaggggtttcgtcgggaggggtcgggggtcggggtcgggttcgggttgcgttttttcggggtttcgggttttcggtttcggcggcgcgggtttatgatacgtcgtagagggtgttggcgttcggttttacggtttttgttcgggttgtcgggttcgggagcgaaaggttggtttttggggagtttagagaacgttgtgtcgcgagttttatatgagtcggtgtttggtagaagttcgcgtcgttcgcgtttaaatcgttcgtttcgtttattttacggtcggcgttttttaaaattcgaatttagcgatttttagtggttgattttggaacgttttttacgtagagcgattgtaggtagggttaatgagagtatgtatcgagatataaatatagcggcgatgataggaggataggggagattgatggtaaaattaattaatagataattaaagagatggggcgggaaatttttttgttttttgtttgttaatttggttgttggtttttgcgggatcgtattgacgtttttaggtgttttttagttaaaatatcgaagtttagtttggaacgtggatggtgtgtttgtagaacgtgttttttagaaaagtcgttttttttaaatattttatgttttgttttagtaacgtagagatggtttttaaagatgaggaaatagatttatagagaatgtgataatttcgtgtcgtatttgcgatttttttaggaattatttatagatatatttagaatttagtttaattgtataaattttgttgacgtttggggtcgcggggacggcgggatcggcggggttttgagaataaggttcgggtagggtaggtttcggtattatagtaacgtaatcgttttaaaaaaatgtttttttttttttgttggggataataaaaatttaagttatgtttcggtatgtagaataaggggaattttaattttttaaattttattttttgtattttttaaatgttttatagtgaatatgtaattaggaaaaatgttataaaattagtgattttatggaatttttgtgtattgttggtgggagtgtaaaatgttgcggttgttgtgaaaaatagtattggtggttttttaaaaaattaaaaatagaattattagatgatttagtaattttatttttggttaaatatttaaaagaatttaaatatagttagggatttgaatagatatttttatatttatgttgatagcggtattttttataatagttcgaaggtagaaatagtttgaatatatattaatagatgaacggataaataaaatggggtgtatattataatgttatttagtttttaaaaggaagggaattttgatatttgttgtaatatagatgaattttgaggacgttatgttaagtgaaataaagtagtttattaagggataaatgttgggttggggtgcggtggtttatgtttgtaattttagcgttttgggaggttaagttgttcggaattattgagttcgagttcgagtttaatttggttaatatggcgaaattttattttgtcgagcgtggtggtttacgtttgtaaatttagtattttgggaggtcgaggtaggtagattattcgaggttaggagtttaagattagtatggttaatatggcgatatttcgtttttattaaaaatataaaaatttgttaggtgttgtggtttacgtttgtaattttagttatttaggaggttgaggtagagttgtttgaatttgaaaggcggaggttgtagtgagtcgaaattatgttacggtattttagtttaggcgataagagtgagattttgttttaaaaaaaaaaaaaaaaaaaaaagagaaggggaaggagaaggaggagaaggaagaaagaaattttatttttattaaagatatatatatatataaattagttcgggcgtgtagatgtatgtttgtcgttttagttatttaggaggttgaggtgggagaatcgttcgagtttaggaggttgaggttgaattgagttatgattgtggtattgtattttagtttgggcgatagagtggtattttttttaaaaaaaaagaaaaaaaaaaaggataaggtcgggtgtggtggtttatgtttgtataattttagtattttgggaggttgaggttagtggattatgaggttaggagatcgagattatttcggttaatttggtgaaaattcgtttttattaaaaatataaaaaattagtcgggcgtggtggtacgggtttgtagttttagttattcgggaggttgaggtaggagaattgtttgaatttaggaggggaaggttgtagtgagttgagattgtgttattgtattttagtttgggtaatagagtaagattttgtttttaaaaaaaaaaaaaaaaaaggataaatattgtatgaggtatttggaataacggaatttatagagatagaaagtaaaatggtggttgttagtgagtaagggaggaatggggagttagtatttaataggtggggagttttagtttgagaagatgaaaaattttggatatggatggtggtgatggttgtataatattgtgaacgtgtttaacgttattgaattgtatatttaaaattggttaaaatggtaaattttatgttgtgtgtgtgtgtgtatatatatatatatatatattaatttcgttttataatcgggttttgtattattgtttaggttggagtatagtggtgtaattatagttaattgtagttttgaattgttggatttatgtaatttttttattttagttttttgagtagttgggattaataggaatgtattattatatttggttaattttttttttttttttttttgagatggagttttattttgttattaggttggagtgtagtggtgcgattattatttattgtaatttttgtttttcgggtttaagcgatttttttgttttagttttttaagtagttaggattataggcgtgtgttattacgtttaaagtgttgagattataggcgtgagttatcgtattttgttatttggttgattttttaaaaaatattttgtggtgttatggtaattttggtttattatatagtttttattatatagttatgtatatataataaaggtattatatagtttttatgtttaataatggggatatgttttgcgaaatgtgttgttagacgattttgttattgtgtaattataaagtgtatttatataaa

SEQ ID NO: 130 - DNA, 2501 bp, Artificial Sequence
  chemically treated genomic DNA (Homo sapiens)
ttagtaaaagtagttttagtgagtgatcgtgaaagttaggtttgagtgggtttaagagtgagtgggaggagaggagttggaaataagtaataataattaataattaattcgtttatgggattttgttgtaaagggaaatagagaaattgggtggtagttggaggagaaagtatagatgaaaattttgtaagatgggagaaataatatgtatgttttagtggaaaaggggaaaattgatggtggggggcggtggagaattgttaaagtaatttaagttttagagggatattagtgtgttttgggttggttgtttagaagggtaagtatagtatatggggatataagtttggaggtggggagatgtgataagtggggttttggagttttttaatttttttattgaagtaaaggatatattaatagtatttattatgttagattgttttgaaaataagtgtgtttttttaaagtattttaaatagttgttggtatatattgggtatttaaatgatagtaatgatagtaattattagttattattgttttttaaatattaatttgtggaataatatgtgtttattagtttattttagtataaatgaaaatgggaaaaagaaggataatataggtatgttttaaaataaatatattttagtttgagattaagtttttttattttttaaaatgggtttttttttatgaaaagtagtggtattaaatggtaggggtttttttttttttttagtaatattgtattgaagaattgtgtatatatatttatatatatatatatatatttataagtaagtgtgtagtttagtgatttattataaggtgagtatatttatgtattattattcggattaggaaatagaatattagtagtatttggttggattttgggtttttttttttttttttttttaagtgtttttagttcgtagaatagaagaatggttatttttgtgttgggattaaggatttttttttttaattttttggtttgtgaaatttaaaagtttggtaatatgtttaatattgaggagtttaataaattttattaggttatatttttgttggaggaaagaataaaaattaatttttaaatgtattataagtttttagagttatgagaatatttttaaattgacgtgatattgattttttaagtattttttaagttatttgtttgaatgaatgattttatttttatgttatgaaatttataatattttttaaaggattttagatttttgaagataaaatgttttttgtttttttgagttaattaaaagtgtattgagatttgttatttatttatttttattgtttttgttttaaagaaagtaggtttattttttttttttaaaatatttttttaatttagtttttttatgatgatattaggcgggtaatattatgattaatttttaagataaagtgttggttatttatttaatttttagtatttagtgatttgagttgtttttttaggatataatttataaaataagattgaagaatatagagttggtatgtgtatttttatatttttgggttttaagtttttgtttattattttgtgtggttttttgtagtatgtgtatatattttttgtgattatgttaattatttattagttgaaaattagtgtttggggataattgtttttttttaattgagggtatttttttttgcggttggtatttatatttagtatatgttttatttgttttatgattttgttgatgttagggtttagttttttgggtaatttgtttagtttgattttgttttttatttattggttgtagtgttttgattgtttagtatagttattttttaggatcgatagaaatttttttgttttttttttagtagtatttgttttattttttttgtgttgtgtttaataaagagtattagttttttatttttagggatatttgtgattttttttttatatttaataagtaaattagggagaaaatatatgtgtttttggaagtttattatatgaagatggtatataaaatatatttattatgattagaaatataggattaaattatgtttgttttatatttgtagtatatatttttggtttgtataaaagtaattttaaaattttagtttttttaaatagttatgtataaaatatatatatatttatatatatatatatatatatatatatatatatatatatagttatattattgtcggttaaagatgtattttttttttaattaatttaaatgaggttagcgagtatttgtttgatgtttgtatttttgtgggttaggaaataaggtacgggtttttaaaattaatatttcggtgttattttttggattgataagatatagatttgtatatggttttagttttattttatttagattgttttacgtatattattttagaaattttgaaaggaagtgttcgttttttgttagtgttaattatttttgttataaatggtaaatgattggaatatt

SEQ ID NO: 131 - DNA, 2501 bp, Artificial Sequence
  chemically treated genomic DNA (Homo sapiens)
aatattttaattatttgttatttatgataaaaatggttggtattaataaagaacgagtatttttttttagagtttttgagataatgtacgtggaatagtttgggtggaatggggttgaaattatgtgtaagtttgtgttttgttagtttaagaagtgatatcgagatgttaattttagggattcgtgttttgttttttagtttataagaatgtaaatattaaatagatattcgttagttttatttaaattgattaaaggaggagtgtatttttggtcgatagtggtgtaattgtatgtgtgtgtgtgtgtgtgtgtgtgtgtgtgtgtgtgggtgtatgtgtgttttgtgtataattatttaaggaaattggaattttaaagttatttttatataaattaagaatatatgttatagatataagatagatatggtttggttttatatttttagttatgatgaatgtattttgtatattatttttatataataaatttttaaaaatatatatattttttttttgatttgtttgttaagtgtaaaaaagaggttataggtgtttttgggggtggaggattagtgttttttattaaatatagtataagaaagataaagtaaatgttgttgaagagagggtaaagaggtttttatcggttttagaaaatggttgtgttaaataattagaatattgtaattagtaagtaaaaaataaaattaaattaggtagattgtttagaaaattaaattttaatattaataggattatgaaataagtaaagtatatgttgggtgtgagtgttagtcgtagagaaaagtgtttttaattaaaaagaggtagttgtttttaaatattaatttttagttgataaataattagtataattatagagggtgtgtatatatgttgtagaaaattatataaaataataggtaaaagtttgaaatttaagaatgtaaaagtatatatgttagttttgtattttttaattttgttttgtggattatgttttaggaaaataatttaggttattaagtattagaaattgaataagtgattaatattttgttttagaaattggttatagtattattcgtttaatattattataaggaaattagattggaaagatattttaaggggaaaaaataggtttattttttttgggataaagataataaaaatggataaatgataaattttagtatatttttagttaatttaagagggtaagaggtattttgtttttaagaatttgaaattttttaaaaagtattatgggttttataatataagaataaaattatttatttaggtaaatgatttgaagaatgtttgaggaattaatgttacgttagtttagaaatgtttttatggttttggaaatttatagtatatttgggaattaatttttatttttttttttagtagaagtatggtttagtaaggtttattggattttttagtgttaaatatattattagatttttgggttttataggttaggaaattaaaaaaaaaaatttttgattttaatatagggatggttatttttttattttgcgagttaagaatatttgagggagggggaaaaaaaaaatttaaaatttaattagatgttattaatgttttattttttgattcgggtggtagtgtataggtatgtttattttatgatgagttattgagttgtatatttatttgtgaatgtgtgtgtatatatatgaatgtatgtatataattttttaatgtaatattattaaaagaagaaaaaaatttttgttatttagtattattattttttataggagaaaatttattttaaaaggtggaagggtttaattttagattaaaatatatttgttttgaaatatatttatattattttttttttttttatttttatttgtattagaataaattaatgaatatatgttgttttatagattggtatttgggaagtagtgatagttagtaattgttattattgttattatttgagtatttaatatgtgttagtaattatttaaagtgttttaaaggaatatatttatttttaaggtaatttaatatgataggtattattagtatattttttattttaatgggaaaattaaagaattttaagattttatttgttatatttttttatttttaagtttatgtttttatatattgtgtttgtttttttagatagttaatttaaaatatattggtgtttttttgagatttgaattgttttagtaattttttatcgttttttattattaattttttttttttttattggaatatatatgttattttttttattttataaaatttttatttgtatttttttttttagttattatttaatttttttatttttttttatagtaaaattttatgagcgagttggttattagttattattatttgtttttaatttttttttttttatttatttttaaatttatttaagtttagtttttacgattatttattgaaattgtttttgttaa

SEQ ID NO: 132 - DNA, 4001 bp, Artificial Sequence
  chemically treated genomic DNA (Homo sapiens)
ttagtttagtgtttttaatttgtttttttgattttttagttttggagttagggagtatatatattttaaagtataaattatatatttttggatagagtagtttttttgtttattattggggatagaaggggcgtttggttgtattttagatttttaaacgtggaattgagaagaatagttatgataatagaggatattttttattgggttggatattgttttttgaaaggagtatgttggttttttgttggaatgatggtgttggtagggagaattttgggtttttaggtagtgggttgagggttttggatatttttttatatttaaggggttgttaggtcgttagtagggataagggagtagttatagggtttttattttttatgcgtttatggttcgtgtgtatattatatatattatgtatatgttatttttaagtagatgttttgtttattgtgtgttggagtgggagggttattttaaggtttttatttttagatgtaatttttagttttattgggattgggttgagtgattgtttaattattgtttttttggtagagatgtttttagggcgttttttggtgtattttttatcggtggttgtttggtgaagcgggaaagttttttagtttttttattgattttttttttttttttttttttttattaattagtgtttattgaatatttattgtgtattgggtattgttttgtttttagtggggaacgaggttaggacgggttttttttattcgtattttggttgggggtaggggcgacggtagtatataaggttatgtaggttatatattagttgagggttgttatggaggaggaggatagagggtaaggtgacgtttatagcgataagtatagtagggtagtgattgttattggttgttattttttgaggattaggtttgtgttggacgttttattttttatagatatttgtggttagtgagggataggttttgagatgggagtaagtcgttagaggttatataatttgggagaggtaagtaaggtatgaaggatgagattattttgagagtggtgggggtaatattagggtttgattaagggaaagaggcggtattagagtttttggttgttagaggttggtagggttagggagtaggtgtgagaggttattattattgttaggagagattagaatttttgtttagggagaggatagtttattaggggtttgttttaaagtaggatcgttaggattagtggttaaggtttgtgaggggtaagggatagtgaggggtacggatggttgttgggaggatgaagtgttatttgttgagggtttagtaggttgagttttagatgttggttatatttaggagttgagggtggggttttggttgttggggtttttttgtttcgggtttttttattttagggtttgttatagagttgatgggtggtattaaaggggcgaatgttgtttgtggtaggatggggaggttgcgtgggttttcggatagggatataggttagggaaggagtaagaggggtgcgtgtgagttgggtggggtttggtgttattttgggtttatagtcggggaagaagtttgagttttgagttgtttttcgtgtggggaggtttggtttaagtattcggtaaagttataggggtattttagggtgtgtttttttttgttggtaggaaaggtggatggggaggttttgattcgcggggttggtgaaagattttgtttgaggtttttaggttattttgttttgttttggtttcggtgattattattatttttgggagttattgtgatatttggttttttaggtggattttttcgtagtattacgtgtagtttttagttttttggttttagtttaagtttttttttatttttttttgtaggagtgaggtagtttttgtttattgtgtttaggtattttacggtgtttttatagtttgaagtttttattttgttttggtttttgtttatttgttggtttttgggttggtttattagagtgtttttaagggaaagtaggggttaggttttttttttggtgttttttttttttgtgattagaagtgatttagtttttgcgggggtaatgagagttagggaggcgtttagttattttagggttgggtcgaggtttggttattcgtgtaaaatagggtaaggttgagttttattagtgttgtttgggagaagggttttagggggtattataatagggtgattttattgaattttaattggatgcggtagaagtgagtttagtatgggggttgggtgggtagaggtttcgtatatattttttttttttttatgtatttggttttaggtggattgtttaggtaatagtagatatatgtgttatattatggtgtgggttttatagcgttttatggaggagagggggttggatggattgttgtcggtttattttttaaggttagtttttgttgttttgtttttagaagagtttttttttattgtttagtttgaggtggggttgcggggaggaggtttacgtttttttttgtgtttggtaggtgaagggttggatgtatagtgggagtcggaggcggggggttgtagggagtatattagcgatcggttttttaattttttagttatttagtaatatcgttatagtaattagtaattagacggtagtagtcgaggtaaatataagcggacggttttttatcgtcgtcgaggatagggaatgattacggtaaattaggttattttgttaattagggaggtggagtgttattagtggggaggggcggttatcgttcgttgtatagagcgttatgtcggttggagaagaggcgttggggtaggggttgtagtgtggttcggttttatttttttgttggtattgagtgtttttagggtagttgggtttttgtttgtttggttttagtgttttttgtggtaagagggagaggtgttttatttcgtgttttttgtttgggttcgttgttgttagattatgggatgtcggtaaagtttagaggaaaaagaagtagttcggcggtttcggagaattgatcgttatttgcgtttagagagttagcggtaacgtcgcgaaattaagttgtttttgttgggtattagtaatttaggtaagagtattatcgttaaatagatgaagattatttatagcggcggttttaatttggaggtttgtaaggagtataagttttttattatttataatgttatcgattcgttgattcgtattattcgggttttggtcgtttttaggatcgatttttataatttcgatcgcgtttacgacgttgtgtagttttttgcgttgacgggtttcgttgagagtaagggcgagattatattcgagttgttgggtgttatgcgacggttttgggtcgatttaggggtataggtttgttttagtcgttttagcgagtattatttggaggataacgcggtttattatttgaacgatttggagcgtatcgtcgtagttgattatatttttattgtcgaggatattttgcgttttcgggatatgattacgggtattgtggagaataagtttatttttaaggagtttatttttaagatggtggacgtgggggggtagaggttagagcgtaaaaagtggatttattgtttcgagggcgttatagttattattttttgtgtggagtttagcggttacgatttgaaattttacgaggataattagatagtaagtggggtcgggggtttttttttgtttgtttttgttgtcgtgggtttttggaagtaagaggattcgtgaggtttaggatagtttgtagttagaaagggaattaggcgtaggtttggttttgttgtacgataattgaggtagttttagtaaggtgggggtagagggaatagggtgtggagtgtaggtgttatgttttatgtttgaagtatttagggtgtggaggttatagggtaagagagtgtgaggtttcgtcgggtatttatgattaatttatg

SEQ ID NO: 133 - DNA, 4001 bp, Artificial Sequence
  chemically treated genomic DNA (Homo sapiens)
tatggattgattatggatgttcggcggagttttatatttttttgttttgtggtttttatattttgagtattttaggtatgggatatgatatttgtattttatattttgttttttttgtttttattttgttggagttgttttagttatcgtgtagtagggttaggtttgcgtttggttttttttttggttgtagattgttttggattttacgagtttttttgtttttaggaatttacgatagtaggaataagtagaggaaaattttcggttttatttattgtttggttattttcgtagagttttaggtcgtagtcgttgagttttatatagaagatgatggttgtgacgttttcgaagtagtggatttattttttgcgttttgatttttgtttttttacgtttattattttgaaggtgagttttttgaaggtgaatttgttttttataatgttcgtggttatgtttcgggagcgtaggatgttttcgatagtggggatatagttagttgcggcgatgcgttttaggtcgtttaggtagtaggtcgcgttgttttttaggtggtattcgttggagcggttgaagtaggtttgtgtttttgggtcggtttagagtcgtcgtatgatatttagtagttcgggtgtgatttcgtttttgtttttagcggggttcgttagcgtaaagagttgtatagcgtcgtaggcgcggtcggggttgtggaagtcgattttgagggcggttagggttcggatgatgcgggttagcgagtcgatggtattgtagatgatgaggggtttgtattttttgtaggtttttaggttgaagtcgtcgttgtggatgatttttatttgtttgacgatggtgtttttgtttgagttgttggtgtttagtaggagtagtttgatttcgcggcgttgtcgttggttttttgagcgtaggtggcggttaatttttcgggatcgtcgggttgttttttttttttttgagttttgtcgatattttatggtttggtagtagcgggtttagataaggagtacgggatggggtattttttttttttgttataggggatattgagattaggtagataagagtttagttgttttggaggtatttagtgttagtaggggggtgaggtcgagttatattgtagtttttgttttagcgttttttttttagtcggtatggcgttttgtgtagcgggcggtggtcgtttttttttattagtgatattttatttttttagttggtaaagtggtttgatttgtcgtagttattttttgttttcggcgacggtgggaagtcgttcgtttgtgtttgtttcggttgttgtcgtttggttgttggttgttgtggcgatgttgttgagtggttggagggttggagggtcggtcgttggtgtgttttttgtagtttttcgttttcggtttttattgtgtatttagttttttatttgttaaatatagagaaaagcgtgagtttttttttcgtagttttattttaggttggatagtgaaagggagtttttttgaaagtaaagtagtagagattggttttggaaaatgagtcggtaataatttatttaatttttttttttttatggggcgttgtagggtttatattatggtgtaatatatatgtttgttgttgtttggatagtttatttgaagttaggtgtatgagggagaggagggtgtgtgcgaggtttttgtttatttagtttttatgttggatttatttttatcgtatttagttaggatttaataaggttattttgttgtgatgttttttggggttttttttttagatagtattgatagagtttagttttgttttgttttatacgggtggttaggtttcggtttagttttgggataattgagcgtttttttgatttttattattttcgtaggagttgggttatttttgattatagggaggaaaagtattaggagggagatttggtttttgtttttttttgagggtattttgatgggttagtttaggagttagtagataggtagggattagagtaaggtggaggttttaggttgtgggagtatcgtgaggtgtttaagtatagtgggtaggggttgttttatttttgtagaaggaggtagaggggggtttgggttgagattaaggagttgggggttgtacgtggtgttgcggggaaatttatttgggagattagatgttatagtggtttttaagggtagtagtaattatcgaggttagggtaaggtagggtggtttagaggttttaggtagaattttttattaatttcgcgagttagggtttttttatttattttttttgttagtagggaggggtatattttaggatgtttttgtgattttgtcgggtgtttaggttaggtttttttatacgaggggtagtttaaagtttaggtttttttttcggttgtgagtttagggtggtattaggttttatttaatttatacgtattttttttgttttttttttgatttatgtttttgttcggagatttacgtagtttttttattttgttataggtagtattcgtttttttaatattatttattaattttgtgataggttttggggtgggaaggttcgaggtagagagattttaatagttaaggttttatttttaatttttgggtgtgattagtatttgaaatttaatttgttaaatttttagtaaatggtattttatttttttagtagttattcgtgttttttattgttttttgttttttatagattttgattattagttttggcgattttgttttgaagtaggtttttggtgggttgttttttttttgggtagaggttttggttttttttggtagtggtggtggttttttatatttgttttttagttttgttagtttttgatagttagaggttttaatgtcgttttttttttttggttagattttgatattatttttattatttttagggtggttttattttttatgttttgtttgttttttttaggttgtgtggtttttggcgatttatttttattttagagtttgttttttattggttataggtatttgtgaagagtaaagcgtttagtataagtttggtttttagagagtgatagttagtagtagttattgttttgttgtgtttgtcgttgtgagcgttattttgttttttgttttttttttttatagtagtttttagttaatgtgtgatttatatgattttgtgtgttgtcgtcgtttttatttttagttagagtgcgggtgaggagggttcgttttggtttcgttttttattgggaatagagtagtgtttagtgtatagtgggtgtttagtaagtattggttggtggaaggagggagggagggaaggaattaatggagaggttgaggaattttttcgttttattaggtagttatcgatgagaagtgtattagggaacgttttagaaatatttttgttaagagggtagtgattaaatagttatttagtttaattttagtgaggttgaaaattatatttgagaatggaagttttgagatgatttttttattttagtatatagtgggtagaatatttgtttaaagatgatatgtatatgatatgtgtaatatgtatacgaattatgagcgtatggaggatggagattttgtggttgtttttttgtttttgttgacgatttgatagttttttaggtgtggaaaggtgtttaaagtttttagtttattgtttggggatttagggttttttttattagtattattattttagtaggaagttaatatgttttttttagaaggtagtgtttaatttagtgggaggtgttttttgttgttatgattgttttttttaattttacgtttgaaaatttgaggtatagttaggcgttttttttgtttttagtggtgggtagagaagttgttttgtttaaggatgtgtgatttgtgttttgggatgtatgtgttttttggttttaaggttggggaattaggagagtaggttggggatattgggttgg

SEQ ID NO: 134 - DNA, 4001 bp, Artificial Sequence
  chemically treated genomic DNA (Homo sapiens)
ttgagattgggttatgagattggttaagattggttaattttggtattttgggtagagatagttttatttttttgaaattttggtttggttggaattttgggttttaagtgttaggattttaaagggttgggattataggtattagtattgtggttggtttagaatgaatttttaattgaagagttggaaaaattaaatgattgttaattttaatttttaaatattataggaatggaagttggatatattttgtgatttgtacgagatattgattattatataggttgttattttttttaatacgaggcgtaaggtggattggttgattgagaagatgtatgttagagattttatagtttttgttttggtaagaggtgttttaaaatgtttggatttttattaaagtaggatttagattataatatagttgttaagtgttgtgttgtcgttttttttgtttaaaataaagttgttttttaattatatttgtttgttatttttttgtagtagttagggacgtttggttttatatatgttgattaaaattaaatatcgatttgattggtgatttttgaattaaggtttattaatttgtagtatggtgatatggattagaaggagagagatgttattatgagggaatttcggttagggttaagtcgtgttttgattattattgatttgttggtaagttttttaatgttttttaaaaatttattaaaagttagttttttggggggtaggtttttaagtaatttttgttaatttgggttatttggaagagtaaaagattatattttatagtgggttatattatttagtatagttcgttattattttgtggtttatatgataggtgttaagtttttttgaattaatttttaaaatatgttattgtgttttaggttcgcgggattgatgtgtaataagtgtttttggttataaattatgatttatttattaatcgtgaaaattatatttataggtgagaagttagtattttggttgtattgaaaaaaatttatacgtttttttattgtgatttgtatgaaaggtaatattaaattaaggaatagatttagtaaagttagtagtgtttagtaagatgatgtaattaaatttgtattagggaaggttgatgagaataaagtgggaaaatttgtaaatattgtttagattgtggatatagggtttttttttataattgttggttttattttatgtttgagtttttagtgatgtttttgtgtttatgtgttttttttggtgattttttttatagttgggatttttttggtgtcgtttggtagtaatttgagtgaattttggtttagttatagtggttttatttttaaataaattgaattgtattttgttatatgatgtaaaaaaagattttttaaaaaatataggagtcgatagtagtagttggtgacgagatggtatttagaaacggcgttgacgtaatttaggacgtggaattataagcgaaatagtatattgtttgaataaagagcgagtcggtatttatatttgttttttttttgttatgattatttgatttttaagttgttttagttaaggtatttttttgtattagtatttttattagggaattttttttattaggtggtttgtattgtttggtttttaatatgtaggtagttgtttggtagttaaatacgtttagagtaatttgagttataacgtgtgaaattgagtaaaaaagtagtgataagtttgggttattatattaaatatttgtttttttattggaaaaaagtaagttttagaaaatagttaatttttgtagtatttgtttatagtttatagttttagaagtgcgtcgaaatggattatataattgtttttttatttttggtgtttatatttgttttaggttgatatttgtttttggttggtttattttggtatgggttttaattttattattttaaatacgatattgttatttgttttataataatgtttaagatgtttgataaaaattttattttgtagttagataagttttgaatttttttggtattaattgtaaaggaagatttttttttttagatatgtattagtagttagtgttttagttagaagtacgaattataattttgataagtaaatagtagttggtggttaataagtggatcgttatgtttagtagtttatatattatgtgagaagtaacgttttgatttttttttttatatagaattggtagagggggtcgatttgggaggaaaggtgtggttataaattttgttattgaagaagataagaggatttttcgtgatattgagattttttataatattatagtggaggagatgtttatgaatgtggttgattttatttaatttttgggatgagagttttggatgtagtgttcgttgttgttgaataggcgattataacgtgtattgtgtttttttttttgggaatatttgaattttgttttaatgtttataacggattagaaatatagattttgatagtaaagcgacgttagtcgtgagtttttgtgaggaaagttattggttttattttttttagagttagattgttggggtgggtataaaagatggggtttgtaaaattttttttttttagaaatttattttttagttttgtagaaatggttgtattagatgttttttattatttaataatatatttgtggattaaaagatataagtgttgtataaaattagttaattatgttaaattagtatatttgtttttattgtgtttgttattagtttgagtagaaaggtttttaaaatttttttagaaagtatttgaatgtattttgtttggtattgtatttatttaataaagtatttaattagtgttaagtgtgaattggattttgttgttaagttttagtaagtaattttaggtagggtttaatttttagtaaaattgttatattgtatatgttttaatgaagtttgaatgttaaataaattgtatatttattttaaaggtgtttttggttattttatttttattataattttattatttataaaattttttatttagatatatttacgttaataattttgagataattgttgtattatagttgtataaaggttgatgagttgtaaatgtttattagtattatttgttaggtatttgttaattttttacgagaaaaatttaagaaattagtattttttaggtagttaaatgttttattgatatgtgtaaagtatttatttacggtaagtttttttgtgataatagatttttgtttattagataagttattttttataattatattatggagttgattgacgagttgagttgttgtatgatttttatttattaaattttataataaaaaaaatttttggtatgatgatttaatatttttttttttaaagttagtaagttgattttattttgattatagtttttagtttgttaaaagagttattttgataggtagtaaatattttattaatttttttagttggtattatttaggtaattgaatgttcggtattaaagatgtttttaggtgagattagatatatattttgttaattggttttcgtgtttttagttatttttgttttatatttaagttttatatttttttgggaaggttttgggagaacggaaagggttagagtaattttagttattattaagtaattaaggtgttaataattgtgtttttaaagttttttaatggttttgtgaatttttaagtttgggtatatatggattatagtttgttttggttagtggatgaagattaagtttttttttagcggttataacgattttttagaatagtggttaagattaattaaaaagattgatttttttaaaggggaagtgtttttttttttaatgtttttatgtaaagatgttattaatgagattggtttaaaaagtttataatatttagaaaattaaagaggattagtggtattagttttgttatatggaaggtttatcgtgaaggt

SEQ ID NO: 135 - DNA, 4001 bp, Artificial Sequence
  chemically treated genomic DNA (Homo sapiens)
atttttacggtaggttttttatatgataagattggtattattaattttttttaattttttggatattgtggattttttaaattaattttattagtggtatttttatatggagatattgagagaaagggtattttttttttaaagaaattagtttttttgattgattttggttattgttttgaggaatcgttatagtcgttaggggaaaatttaatttttatttattgattagaataagttataatttatgtgtgtttaaatttggaagtttataaagttattaaagggttttaaaagtatagttgttagtattttggttgtttagtggtgattggagttattttggtttttttcgtttttttaaagtttttttaggaaagtatggaatttaggtgtggaatagaaatgattgggggtacgggggttagttggtagagtgtatgtttagttttatttagaaatatttttaatatcgaatatttaattatttaggtaatattagttgagaaaattgatggagtatttgttgtttgttagagtggtttttttgataaattagaagttgtggttaaggtaaagttagtttattaattttggggaaaggaatattaagttattatattaaaagttttttttattataggatttaatagatgagggttatgtagtaatttagttcgttaattaattttatgatgtggttgtagaaaataatttatttgataaatagaagtttattattatagaaaaatttgtcgtaagtaggtattttgtatatgttaatggaatatttaattatttgaaggatgttaattttttaaatttttttcgtaggaagttgataaatgtttagtagatggtgttgatgaatatttgtaatttattagtttttgtgtaattgtgatgtagtagttattttagaattgttaacgtgaatatatttggatggggggttttgtaaataatgaagttgtaataaaaataaaatgattaaaagtatttttaaagtgaatatataatttatttaatatttaaattttattaagatatgtgtaatatggtaattttattggggattaaattttatttaggattgtttgttggggtttagtaatagggtttagtttatatttagtattaattaaatattttattgaataaatataatattaaataaaatgtatttaaatgttttttaaaaaaattttaaaggtttttttatttaggttaatgataaatataataaaggtagatatgttagtttaatataattggttgattttatatagtatttatattttttagtttataagtatattattaaatgatagagaatatttaatataattatttttatagaattaggaaataaatttttaagaaagaaagattttatagattttattttttatatttattttaatagtttaattttaaagaggataaagttaatgattttttttataagagtttacgattaacgtcgttttgttattaaaatttgtatttttgattcgttatgagtattgagataagatttaaatatttttaaagaaagaagtataatgtacgttgtgatcgtttatttagtaatagcgagtattgtatttaaaatttttattttaggaattaaataaggttagttatatttatgggtattttttttattgtagtattgtagaaagttttaatgttacgaagaatttttttgttttttttagtaataaagtttatagttatatttttttttttaaatcgattttttttgttaattttgtgtaagaaaaagaattagaacgttattttttatataatgtataaattattgaatatgacgatttatttgttaattattagttgttgtttatttattaaggttatagttcgtgtttttaattggagtattagttgttaatgtatatttagagaaaaaaatttttttttgtagttagtgttaaaaggatttaaggtttgtttggttgtaaaatgagatttttattaggtattttgagtattattataaagtagatgatagtatcgtgtttggggtagtgaaattaaagtttatattaaagtgggttagttaagagtaggtgttagtttgggatagatgtgaatattaggaataaaagagtagttatgtaatttatttcgacgtatttttggaattgtaaattgtaaataaatgttgtaaaggttaattattttttaaaatttatttttttttagtgggaaaataaatatttggtatggtaatttaaatttattattgtttttttgtttagttttatacgttgtaatttaaattattttaaacgtgtttaattgttaaatagttatttgtatgttagaaattagataatataaattatttaataagaaaggttttttaatagaaatattaatataaaaaaatgttttagttggagtaatttaaaaattaaataattatgataaaagaaaaataaatataaatatcgattcgttttttatttaaatagtgtgttgtttcgtttatgattttacgttttaaattacgttaacgtcgtttttgagtgttatttcgttattaattgttgttatcgatttttgtattttttaaaaagtttttttttatattatataataaagtataatttaatttatttagggataaagttattataattaaattagggtttatttaaattgttattaggcgatattaagaaaattttaattatagaaaaaattattaagaaaaatatatggatataagaatattattaaaagtttaagtataaggtaagattaataattgtggaaaaaaattttatgtttataatttgggtaatgtttataagtttttttattttgtttttattaattttttttagtataaatttaattatattattttattgaatattattgattttattgaatttattttttgatttgatgttattttttatataaattatagtagaaaaacgtatgaattttttttaatatagttaagatgttggttttttatttgtgaatatagtttttacgattggtaggtagattataatttataattaaagatatttgttgtatattaatttcgcgagtttgaaatataatggtatgttttaaaaattgatttaaaaaaatttgatatttgttatgtaggttataaaatagtagcgaattatattaagtggtatagtttattgtggagtgtggttttttatttttttaaatagtttaagttggtaaaggttatttaaaaatttgttttttaaaaagttaatttttggtagatttttaaaaagtattaagagatttattaataagttagtagtgattagaatacgatttgattttgatcggaatttttttatgataatatttttttttttttggtttatgttattatgttgtaaattaataaattttaatttaagaattattagttaggtcggtatttaattttaattaatatgtatgagattaagcgtttttggttgttataggagaatagtagataggtatagttaagaaataattttattttaagtagggggaacgataatatagtatttagtagttatattgtagtttgaattttgttttagtggaaatttagatattttagaatattttttattagagtagaaattgtgaagtttttggtatgtatttttttagttagttagtttattttgcgtttcgtattgagaaaaataatagtttgtgtaatggttagtgtttcgtataagttataaagtgtatttaatttttatttttgtaatgtttagaagttaaagttaatagttatttagtttttttaattttttagttaaaaatttattttgggttagttatagtgttaatgtttgtaattttagttttttgggattttagtatttagagtttagagttttaattagattagggttttaagaaagtgaaattgtttttatttaaaatattaaaattggttagttttagttagttttataatttagttttaa

SEQ ID NO: 136 - DNA, 4001 bp, Artificial Sequence
  chemically treated genomic DNA (Homo sapiens)
ttttttatagttttttgatgaggtgtagaattgggaaataaggggtttgggaggatttattacgtgaattttgtgataagggaaaaaagtatgagtttagtaaaagaagttttagattataatgtttgaaattgttttaggtaattaattagaatgaagttttttagttaattttttattgtatttattatatgttgattaggtgttaagatattagatttttttttttatgtgtttaagtgtttttaagttatttttattgggattggattttatttggtaataaattagatagatgttatgagtttttttttaatagaggtgatatttttaatgttattttttatttttttttaaaataagcgtcgatttttgaagatagtgatttaagtttttgtagtatttgttagtgatgtgtagaataggggggttgattttagatttttgttcgtatttgtgtttgttgtttaatttataagtagagttttgaagaaaaagattatttggaattgtattacgttttgttttttttggaataatttaggaaatgtatttagttgttttggtttattaggatgaattataggttaatgttttagtaatgtgttgtgaagttggataaaagggggttttatttggggttaaaaaaattattttttttttttatattgaagttttaagtaaggacgagtgatgtcgggtgtaatgtattattttttaaaatgtgttaatagttttgaggtaatttggattttattgtagttttaaaggtatttttagagttgtagtttgaaattgtatattttaaataaatttttgggggttattatgtttagtgaatttgagaatggtttttaggtgaatagattgatgttgggatagtagtagttcgtggttgatgtgttgagtttattgtattttttttttgtgttttcgggttttttggagtaagatggagtataatttcgttagttaggattttaggatagggatatagtttttcgaacgatggtggaagttagtgggtgttatatgggatgaagattgagagggaaatttttagaattggttgggcgtggataaagcggggaaaaaagtattgattaaatttattttagttttggagaatttaaggaataagggatatatatacgtatatatatatataggtatgaatatattagatatattttttagtttgtatattttagttttagatagattttttttttattagaggtaaagtgattttattagaagaatgtgttttttaggagttgttagatggtttgtcgttttgtgttcgtttattgtggacggttgttttacgtggatgtttatattatagtgggatttacggttttatttaaaagagagttatggtttttagatttttgataagagggttataatttgaaaaggggtttttggttagtttttttaggtttagtttgagaatagaattagttttatatttttaggttatttgttatatatatttttttttatttttaattgatacgggtggggggagattttcgaaaatagtgatgttggtaatttatagttagtaaataaattatgtttttatatgtaaggatttatattaggggattttgtttataggtatttggaggttaaattcgtatgtgttttttgttaatttgagttattgtttttgtgtttttgagaataatatattttgtaagaaggaaagacgtataagtaatagtgtagtttttttagtaggcggaagttagtacggtgtgttttttgtgtaaggggagttgcgttaagtaatgtgtttggtgattgatagattttttgttttagattttggttatttttgattagtagatgcggatatggaattaagggtaattgaaggatatttatcgagttagatatatattttagaataaggtttttattgttttagaaataatattttagaagatgaaattatttaggatgttttaaaaatatttatttatataaagattttgagagtaatatttatatttgtttttatattttagtttatgcgtttggggttaagttattgtgtggtatatgtgtagttttttcgaatgttttatatgttgtagtatttgtttttaggaatattaaatgaatatagggttttggaggggaagtgggggaagaatttataatgttttaaggttgtatggaattataatttagaaatgtgtattttgatttggaaggcgtttaattaagtgtttaaggggaaatatgatcgagggagaggtgagaggagggatttagagggtagataggagagggttgatttttatttttttttttgcgtttagtatatttaaaaggtttaatatagttgatgggttaggaattgtatgatttggattttttttttgtagtgatttacgatgttaattgatgtagaggatagtttgtaaaagtaatagatttgtttttaattttagatagtatgagatataattttgggattttgttttcgtaatttgtttttaaaaaaaaaaaaaaaatgtttgttttgtataatataatttagattttttagagtagatgtggtatagtaatgagtaaatttaattttagatttgaagtgttttttagtttggttttgatttagttattttttgtttttttttttttttttagggtagtttaaattttattgttatataatattttaatttattattttttttttttatttttattttttttgtttgcgttatagaaagtttgtgtgttttgaagagtttagtttttttttaattaaatttatattttttttattatcgtgatttttagagttagtaagaaagaaatgttttaaaaggaaatttttattttagttatttgttcggagtcgaaggttgtgggttttaggttttttagtgaggtttgttgtttgtgtgtttttcgaggagcgggtagttaggtagtggtggtttttttttttttttttttgtcgtacgtggggttttagttatatttataagattttattattatgttggagagttgttttattttgggggtttttttaatatagtataggatggttaggggttttaggttttggggtacgtagtaaggcgaggtagatgttttagggtttagagtgttgtatagttttagtatttgggaagggatatgttagtgagaggttggaaggttaagttttaggtttggaatttaggaagtcgtttagttttaggggtagttttagaagttgagtaagtgttagaatggttacgggtgttttttaagaggaattgttgggggtcgggtgtagtggtttatagttgtagttttaggatttgggaggtagaggtaggtagattattttaggttaggagtttgagattagtttggttagtatggtgaaattttatttttattaaaaatataaaaaaattagttggttgtggtggtaggcgtttgtaattttagttatttgggaggttgaggtgggaggattatttgaatttaggaagtagaggttgtagtaagtagaaatagtgttatcgtattttagtttgagttatagagtgagtttgttttaaaaaaaagaaaaaaaaaaaaattgttggaatttggtttgggtgagtgagtagttgtgtagttgttgtttatttataatgatagaagtagaataattgtatttgtttggggtgatgagttgaagtatatgatagttattatattgataacgaattattttggttttttttttttttttttttttttttttttgagttagagttttatttttttatttaggttgaagtgtagtggtgtaattttggtttattgtaattttcgttttttgggtttaagcgatttttttgttttagttttttaagtagttgggattataagcgcgtgttattatattcggttaattttttatatttttggtagagatagggttttattatgttggttaggttggtttcgaatttttgattttgtgatttattcgt

SEQ ID NO: 137 - DNA, 4001 bp, Artificial Sequence
  chemically treated genomic DNA (Homo sapiens)
gcgggtggattataaggttaggagttcgagattagtttggttaatatggtgaaattttgtttttattaaaaatgtaaaaaattagtcgggtgtggtggtacgcgtttgtaattttagttatttgggaggttgaggtaggagaatcgtttgaatttaggaggcggaagttgtagtgagttaagattgtattattgtattttagtttgggtgaaagagtgagattttgatttaaaaaaaaaaaaaaaaaaaaaaaaaaaaagttaagataattcgttattagtgtagtaattgttatatgttttaatttattattttaaataagtgtagttgttttgtttttgttattgtggatgaatagtaattatataattatttatttatttaaattaggttttaatagttttttttttttttttttttttgagatagatttattttgtggtttaggttggagtgcggtggtattatttttgtttattgtaatttttgttttttggatttaggtgatttttttattttagttttttaagtagttgggattataggcgtttgttattatagttagttaatttttttgtatttttagtagagatggggttttattatgttggttaggttggttttaaatttttgatttgaagtgatttgtttgtttttgttttttaagttttgggattatagttgtgagttattgtattcggtttttaatagttttttttaaagagtattcgtggttattttagtatttgtttagtttttgggattgtttttggaattgggcgattttttgggttttaggtttgagatttggttttttaattttttattgatatgtttttttttaggtgttgggattgtataatattttgaattttgaagtatttgtttcgttttgttgcgtgttttaggatttggagtttttgattattttgtattatgttgggaggatttttaaagtggagtagttttttaatatggtggtgaagttttgtaaatgtagttgagattttacgtgcgatagagagaggggagagagaattattattgtttgattgttcgtttttcgggaaatatataagtaataaattttattgagaggtttggagtttataattttcggtttcgggtaaatggttgagatggaggtttttttttggaatattttttttttgttggttttgagaattacggtggtaaagaaagtgtgggtttggttagaggaaggttgaattttttagaatatatagattttttgtgacgtagatagaggggatggggatagaggaaagggatggtaagttgagatgttgtgtggtaatgggatttgggttattttaaagggagaaggaagggtagagaatggttgggttagggttagattggaagatattttagatttgaggttggatttgtttattgttgtattatatttgttttagggaatttggattatgttatataaggtaagtattttttttttttttttaaagataggttacgaagataaagttttagaattgtattttatattgtttgggattaagggtaaatttattatttttgtaaattgttttttatattaattaatatcgtgggttattatagggagaaaatttaggttatgtagtttttggtttattaattgtattgggttttttggatatgttgaacgtagaagaaagggtggaaattaatttttttttgtttgttttttgggtttttttttttatttttttttcgattatatttttttttggatatttggttagacgttttttaggttaggatgtatatttttggattgtggttttatgtagttttggggtattatgggttttttttttattttttttttaagattttgtgtttatttggtgtttttggaagtaggtgttataatatgtgaggtattcggggaagttgtatatgtgttatatagtgatttggttttagacgtatagattgaggtataaagataagtatgaatattatttttaaaatttttgtataaataaatatttttggggtattttggatgattttattttttggaatattgtttttagaatagtaaaagttttattttaaggtgtatgtttgattcgataaatattttttaattatttttaattttatgttcgtatttattaattagaggtaattagaatttggggtagagaatttgttaattattaaatatattgtttagcgtaattttttttatatagggggtatatcgtgttgattttcgtttgttaagaagattgtattattgtttgtgcgttttttttttttgtagagtatattatttttagagatatagaggtagtggtttagattggtagaaagtatatacgaatttgatttttagatatttgtgggtaggattttttggtgtgaatttttgtatatggaaatatggtttatttattaattataaattattaatattattgttttcgaaaatttttttttattcgtattagttgagaatgagagaaaatgtgtatggtaaatggtttaaaaatatgaggttaattttgtttttaggttaagtttaaaagagttaattaggaatttttttttagattgtggtttttttgttagggatttgggaattatagtttttttttgagtgaggtcgtggattttattgtggtatggatatttacgtggggtagtcgtttatagtgagcgggtatagagcgataggttatttagtagtttttgagaaatatatttttttagtgagattattttgtttttagtaaaagaaaagtttatttgaagttaaagtatgtaggttgaaggatgtgtttgatgtgtttatgtttgtgtgtgtgtgtacgtatgtgtgttttttgttttttgagttttttaagattgaagtgagtttggttagtattttttttttcgttttgtttacgtttagttaattttaagggttttttttttagtttttattttatgtggtatttattgatttttattatcgttcggagggttatgtttttgttttaaaattttggttggcgggattatattttattttgttttagggagttcgggggtatagagaggggatgtagtaagtttagtatattagttacgggttgttgttgttttagtattagtttatttatttgagggttatttttaaatttattgggtatgataatttttaagggtttatttaaaatgtatagttttaggttgtagttttagaggtatttttaggattgtagtagggtttaggttgttttaaaattattaatatattttgagaagtggtgtattatattcgatattattcgtttttatttgaggttttaatatagaaaagggaaataatttttttggttttagatgaaatttttttttatttaattttatagtatattgttaaaatattggtttgtggtttattttaatgaattaaggtagttagatatattttttggattattttaaagaaaatagaacgtggtgtaattttaaatggtttttttttttagagttttatttgtaggttaggtagtagatataaatacggataggggtttgaagttagtttttttattttatatattattgataggtgttatagaaatttgaattattgtttttaaaaatcgacgtttgttttgggggagggtaaagagtgatattggaaatattatttttgttggaggagggtttatagtatttgtttggtttattgttaagtgaagtttagttttaataaaaatgatttgaaagtatttggatatatgaagggagagatttggtgttttagtatttgattagtatatggtaagtgtagtaagaaattagttggaagattttattttgattggttatttagggtaattttaagtattatagtttaaaattttttttattgggtttatattttttttttttgttataagatttacgtggtgagtttttttaaattttttattttttaattttatattttattaggggattatggagga

SEQ ID NO: 138 - DNA, 4001 bp, Artificial Sequence
  chemically treated genomic DNA (Homo sapiens)
gtttgggtgtgaggattttaaaggttttttaggtggttaggtatggtggtttatgtttgtaattttagtatattgggaggttgagataggaggattgtttgagtgtaggagtttgagattagtttgggtaatatggtaagattttatttttatgaaaaaaaatttaaaaattagttttgtatggtggtgtatatttgtagttttagttatttgggaggttgaggtgggaggattatttgagtgtaggaggttgaggttgtagtgagttgtgattgtgttgttgtattttagtttaggtaatagagagagattttgttttaaaagaaaaaaattaaaaagaaagttttttagattattttaatgtgtagttatgattgagaattattgttagttgttaatagtgtttggtagatttgattggggggaggaggagggagaaaatataggaatttaataaagttgtagaatatatgattttgttttttttagtatttttttttggttttgtttaatttttttttttttatttttattatttatattttataaaagttattagttatttgttatttagttttagttttttttgatttttttttggaaatatgtttatttttttttttgttagtattttgtgtgttttgatgaataaaatgtttataattatataaagggatataattataattaaatagttataattttaaaatttttttaattttttaaatttatttttgaaaagtgttttggtgatttttttttaatttaggtatttgtaaaagtttgagattgtagattgaattattgttaataaatattatatttaaaaaaaattgatagattgtgttttttgtattttttgtaatatttattagaattgttattgaaatatattttttaaatttatgtttttggaattggaataatttttgttatattttgttttgattttataatatttgttgttgtttataatttagattttttgaaattttgttgtttgttttttattgtttttggaagtgaatgagaggaattttaagagttggatttggtaggatgggatatggtgaagagttttatgaagaatgattttttaaagggtttagttttttttgttatgttatttttgtagttgttgattaaatagaaattttggaataatttttttgttttattggttatggatattgaaatgaaaaagtgttttatttttgtgttttattaattttattttttttatataatggttttaggtaaattatgtagtgtttgtttttattattttttttttttttttttttttggaggaggggaggttaggttttaatgttttagtttttgggtgttgttattttgtgtttgttaggtttggtggttatgttgtttatttgggtggtggttagtttgttttattagggttttttgtggaggttgttttgttgtttttgagtattagttttatgtttagttttagttgtttggtgtagaagtttatggtggtgtatatttagagtgggttggtggtgagtatagtgtttgtagttgtgttttttagtgttagttgtatgggtttttgtagtgttgttaggttttgtaggtgttgttttatattgtatataggttgtttagtaggaagaagttatatgttgttttgtgatttatgttattttgtatgaaggagataattttgatgttttatgttaggaggttattgtggaattaggagaagaaagttgttttgtgtgttttttggagaggagtttggtgtttgtatggtttagtttggatataggtggtggtgaagttttgttgtgggggttgtggttgggggtgaaggatttttgggtgtttttgttttggggttattgaggtagtagtagtgatttttggaagtggagattgtttttattgtttttatgttggtaaatgagatttggttgaaaggaatgataggaatagttttgaaggtggaggaaagttttttgaggtagtatggtagatgagttggaggatgtagatggaaagttgagatgggagtagttaattttttttttatggatttagtgttttttttttgttttttttaaataatattagggttgttatttttttttttattttggttttggttttttgtagataggtgagtttggagattaggttttaaaatagtggttatagtttttgatagtttatagtgtggagtttaagtagttatttaagattgtatttttggaaatgattttattgtgtattatttttggttttaagattatttttgtttgattgaatagtaagggttttaaagtttattgatttattaaagtattgattaaagtagtgatttttaatattgggtgtgtgttagagttatttggtggagtttttaaaggtataaatatgagttttttttgatattatgatttatttggtttagagtggagtttgtattttgttatatttagtattttttaggtaatattagtgtgtggttagggttgagaatttttgtatttaagagttaggagatatagtgttaagtttaattttgttattgattttgtgaattttgagttttattttttaatttgtaaagttgagtgtgggtaaatgaggtaatatgtgtttgttttttatttatgtttatgtttttttttagattttaatattttgatggaagattattttttatatattgttttttttttattgtagttagatataatgagatttggttttttttatttttgtggtttttgaagatttggattgtatttttttttttggttataatttaaaagatttttaaaatttattgatggtttttttgttagtgagttaggtaatattttagggttttgaattttatatattttataattttaaaattttattttagttgttgttttgttattttggtattggttattatatagtgtagtattttgttttaagtttgtggtattggaattttattagtttgtttttattttttgtaggagaaatatttgaattaaaagttgaatttaataatgaaaagaaagaaaagagaaaggaggttgtgaagaaagtgattgttgttatgattgtggggaaggatgttaggtaagagtaattatttttgttattgattattttagaggtttatattttattttatggtttttattgttttttttttaaaagtattataattatagaatttttaagaatgggtttgttttattaaaaatattattaggaagtgtagttgtttttgtattaatgttttattttttgtttgtttgtttgttatggggtgtgtgtgtgtttgtgttagaatagtgaaatgagtttgattttattgtatttagatttagtataatattttttgagagttggtatagttataaatttttttgttgaggttgttttagaagatgataaaaatatattgagaagtataagtttatatgatttttaattggtttaagttattgtttttaattttataattgtatatttaattgttggatttaagatgaaaattaatgttaattaaatttatgtagttttattttttatttttgtaattaagattatttggaaataagtaaggattatatgtaggtttttaaggattattttaagatttttttggggggtttgtgaggttaaagttgtttttataataatatttagatgttatttgttttttttattatttggatgtttatagtgatggtgtaaagtagtggtgggtaaaattgttggtgttttagtatgaatgaaggtagtggtgttaattataatggtagttattgtattttttaatattatgtgttaaaaaagagtagttttatttaggaatgttttttatgagtagtaaaaatttgttttattaaaatttgaatttttttaatattgtgtttgatgaaatagggattatttataaattttttttgttgtgtagtagtgtaatggttgatttgagaaaaaatttttgtgtagttgtttga

SEQ ID NO: 139 - DNA, 4001 bp, Artificial Sequence
  chemically treated genomic DNA (Homo sapiens)
ttaaataattgtataagggtttttttttaagttgattattgtattgttatgtagtagaagagatttatgggtaatttttattttattaaatataatattaaaaaggtttaagttttaataaaataaatttttattgtttatgaaggatatttttaagtgaaattgtttttttttagtatatggtgttaaggaatataatgattattattatggttggtattattgtttttatttatgttgaggtattagtagttttatttattattgttttgtattattattgtaaatatttaaatagtgaaaaaggtaagtaatatttaagtattattatgaaaatagttttgattttatggattttttgaaagggttttaggataatttttaggggtttgtatatagtttttatttatttttaaatggttttaattatagaaataaaaaataagattatatggatttggttaatattgatttttattttgaatttagtaattgaatgtatagttgtaaagttgagggtagtggtttgagttagttaaagattatgtgaatttatgttttttagtgtatttttattattttttaaaatgattttagtaaaaagatttgtaattgtgttagtttttaggaggtgttatgttagatttgaatgtaatgaaattaaatttgttttattgttttaatataaatatatatatattttataataaataaataaataaaaagtagagtattaatataaaggtaattgtattttttaatgatgtttttagtgggataaatttatttttagaggttttatgattatgatatttttaaaggaaaagtagtaaaggttataagatggggtatggatttttgaagtgattaatggtaagggtgattatttttatttaatatttttttttatggttatagtagtaattattttttttatagtttttttttttttttttttttttttattgttgagtttagtttttagtttaaatattttttttgtaagagatgagagtaaattggtaaggttttagtattatagatttagagtagaatattatattatgtaataattaatattaggatagtagggtagtaattaaaataagattttaaaattatagaatatataaaatttaaagttttagaatattatttgatttattgataaggaagttattagtaagttttaaaaattttttaaattatggttagagaggaaggtgtaatttagatttttaagaattataagagtgggaaaaattaaattttattatatttagttataatggggagagaatagtatatgaaggatgattttttattagaatgttaaagtttggaggagaatataaatgtaggtagggagtaggtgtgtattattttatttatttatgtttggttttatagattaagaaatgaggtttaaagtttatagagttagtgataaagttgggtttagtattgtgttttttgatttttgaatgtaaaggtttttagttttggttatatattaatattatttgagaaatattaaatatagtaaagtataggttttattttgggttaaataaattataatgttaaagagaatttatatttatatttttaagagttttattaagtgattttaatgtatatttaatgttgagaattattattttaattagtattttaataaattagtgggttttaaggtttttgttatttaattaaataagaataattttgaaattaagaatggtatataatggagttatttttaaaggtataattttgaatgattgtttaggttttgtattgtaaattgttagggattgtaattattattttaaggtttggtttttaggtttatttatttgtaagaagttggaattaaaataaaaaagaaagtaataattttaatattgtttaaaagaaatggaaaaaaaatattaagtttatgaaaaagaggttgattatttttattttaattttttatttatattttttagtttatttattatattgttttaaaagatttttttttatttttaagattgtttttgttgttttttttaattagattttatttattagtatagaaatagtggggatagtttttgtttttggaggttgttattgttgttttagtggttttggagtgggggtgtttaggggttttttgtttttggttatggtttttataatggggttttgttgttatttgtgtttgagttggattgtgtaggtgttaggtttttttttgaaaggtgtatgagatagttttttttttttggttttataatggttttttggtatagggtattggggttattttttttatgtagagtgatatggattatgaagtagtatatggtttttttttgttgggtggtttgtgtgtggtgtggggtagtgtttgtggggtttggtagtgttgtgggggtttatgtagttgatgttagggggtgtagttgtgggtgttgtatttgttattagtttgttttgggtgtgtgttgttgtgggtttttatattgggtagttggagttggatgtgaagttggtgtttgagggtgatggggtggtttttgtggaaggttttgatgaggtaggttggttgttatttgagtgagtgatatggttgttgggtttggtaggtgtgggatgatggtgtttgaggattgggatattaaaatttgatttttttttttttaaaaaaaaaaaaaagaaagaaatagtggggataaatattatgtgatttgtttgaaattattatgtggaaaggatgaaattagtaagatatagaagtagagtatttttttgttttaatatttatggttaataaggtaaaaaaattgttttaaaatttttatttaattaatagttataaaagtagtatagtaagaaaagttgggttttttaaagagttattttttataggattttttattatgttttattttgttaaatttagtttttagagttttttttatttatttttgggaatagtgaaggataaatggtggggttttagaaagtttgaattgtgaatagtagtaggtgttatagaattaaagtaggatgtaatagaaattattttaattttaaaagtataaatttaaagaatatgttttagtggtagttttggtgggtgttgtaggaagtatagggaatataatttattaattttttttaagtatgatgtttattagtagtgatttaatttgtagttttaaatttttataaatgtttgaattaaaaaaaggttattaggatattttttaagagtaggtttgaagaattaggagagttttaaaattataattatttaattgtaattgtatttttttatataattatagatattttgtttgttaaagtatataaaatgttaatagaagaagaaataaatatatttttaaaagaaaattagaaaaagttgagattgaatgataagtggttaatggtttttgtgaggtgtaagtaataaaaataaggaggaaaaagttgggtaggattaaagaggggtattaaaagaggtaaagttatatattttataattttattaaatttttatattttttttttttttttttttttaattaaatttattaagtattgttagtagttagtagtagtttttaattatggttgtatattaaaataatttggggagttttttttttaattttttttttttgagatagggtttttttttgttgtttaggttggggtatagtggtataattatgatttattgtagttttaattttttgtatttaagtgatttttttattttagttttttaaatagttgggattataggtgtgtattattgtatagggttaatttttaaatttttttttatagagatagggttttattatgttgtttaggttggttttaaatttttgtatttaaataatttttttgttttagttttttaatgtgttgggattataggtataagttattatgtttggttatttggagaatttttaaaatttttatatttagat

SEQ ID NO: 140 - DNA, 4001 bp, Artificial Sequence
  chemically treated genomic DNA (Homo sapiens)
tttgtgtaagtatattttatgattgtataatgataaaattgtttaataatatattttgtagagtatatttttattgttaagtatgggaattgtataatgtttttattatatatatatgattatataataagggttatatgataagttagagttattatggtattataaaatgttttttaaaaaattagttaagtggtagggtgtggtggtttatgtttgtaattttagtattttgggtgtggtggtatatgtttgtagttttagttatttggaaggttgaggtaggggaattgtttgaatttgggaggtagaggttgtagtgagtggtggttgtattattgtattttagtttggtgataaagtaagattttattttaaaaaaaaaaaaaaaaaaaattagttaagtgtgatggtatatttttgttagttttagttatttaggaggttgaagtgggaggattgtatgagtttagtagtttaaggttgtagttagttgtgattgtattattatattttagtttagataatagtgtaagatttggttgtggggtggggttaatatatatatatatatatatatatatatatatataatatagaatttattattttaattagttttaagtgtatagtttagtggtgttaagtatgtttatagtgttgtgtaattattattattatttatatttagaattttttatttttttaaattaaaattttttatttattaaatattaattttttattttttttttatttattggtaattattattttattttttgtttttatgagttttgttattttaggtattttatatagtatttgtttttttttttttttttttttggagatagagttttgttttattgtttaggttggagtgtagtggtataattttagtttattgtaattttttttttttaggtttaagtaatttttttgttttagttttttgagtagttgggattataggtttgtgttattatgtttggttaattttttgtatttttagtagaagtgggtttttattaggttagttgggatggttttgattttttgattttatgatttattggttttagttttttaaagtgttgggattatataggtatgagttattatatttggttttgttttttttttttttttttttttttgagagaggtgttattttgttgtttaggttggagtgtagtgttataattatggtttagtttagttttaattttttggatttgagtgatttttttattttagttttttgagtagttggggtgataggtatatatttgtatgtttgggttaatttgtgtgtgtgtgtatttttggtagaggtggggttttttttttttttttttttttttttttttttttttttttttttttttttttttttttttgagatagagttttatttttgttgtttaggttggagtgttgtggtatgattttggtttattgtaatttttgttttttaggtttaagtaattttgttttagttttttgagtagttgggattataggtgtgagttatagtatttggtaaatttttatatttttagtagagatggggtattgttatgttggttatgttggttttgaatttttgattttgggtgatttgtttgttttggttttttagagtgttgggtttataggtgtgagttattatgtttggtaagatggagttttgttatgttggttaggttggatttgaatttgaatttagtggttttgaataatttggttttttaaagtgttgggattataggtatgaattattgtattttagtttagtatttgttttttggtggattgttttattttatttagtataatgtttttaaggtttatttatgttgtagtaggtgttagaatttttttttttttaaaggttgaataatattgtggtatatattttattttgtttatttgtttatttgttggtgtgtatttaggttgtttttgtttttgggttgttgtgaagaatgttgttattaatatgggtgtgagaatatttgtttaagtttttggttatatttaaatttttttggatatttagttagaagtggaattattggattatttggtaattttatttttgattttttgaggaattattaatattattttttatagtagttgtagtattttatatttttattagtaatgtataagggttttatgaaattattaattttataatattttttttgattatatgtttattgtagaatatttagaaaatgtaagaaataaaatttagaaaattaaaattttttttattttatatattgggatatgatttgaatttttattatttttaataaagggaagagagtatttttttgggatgattgtgttgttatagtgttgaggtttgttttgtttggattttatttttaaagttttgttgattttgttgtttttgtgattttaagtgttagtaaagtttatgtagttgaattggattttgagtatatttgtggatagtttttgggagagttgtagatatgatatggggttgttatattttttatgggtttgtttttttatttttaaaagttatttttgtgttgttaaggtaaagtataaaatgtttgaggaaagtgatttttttagaaagtatgttttataaatatattatttatgttttaaattgagttttggtgttttgattggagggtatttgaggatgttagtatggttttgtaaagattagtaattagattggtaagtagggggtaggagaattttttgttttatttttttagttgtttattggttgattttattattagttttttttgtttttttattattgttgttatatttgtgttttggtgtatatttttattggttttatttgtagttgttttatgtaaggggtgttttagagttagttattgggagttgttggatttgggttttaaaaaatgttggttgtgaagtgggtggagtgagtgatttgaatgtgagtggtgtggatttttgttaagtattggtttatgtgaggtttgtggtatagtgttttttgggttttttagaagttagttttttgtttttggatttggtagtttgagtaggagttgtgggattgggtgttagtattttttgtggtgtgttatgggtttgtgttgttggagttgaaagtttgaggttttgaggaggtgtagtttgagtttgattttgatttttggttttttttggtggggtttttttttaggtaattggttgtggttttattttgaagaggagaaaattgaggtttgtaggtggagtttggattttttgagttttgattttgtggtatttttttgttgggggataatgtggttttgttgtttggtatttgttttgggtatgggtggtgttagttttgtgaggggttggagtaggtggttttgaaagtgggaagggattggtttagttatttggtttttaatgttgtttttttgttaggattagtggttatttagtgtttattgtttattgttaattaggtattgttttttattgtttgtgtgttattttagttttatattgtgtttattttatagttaatgagaaagttgaggtataggttagagagtttgagtagagttatataatttggtgttttggtggatatgggatttttaattttttgtgtttgtgtatttttaaattgtaaaagtattgattgtttttggtgatgattttaaataggagtttttttaggaggtgttttttaggggtttttttttttttttgggagaggttgttaggttttgaattgaggttttttgtgttgtttattttgttgttttttagagtttgtgtttgggaaaaggggttgaagtttgtgttttaattgtttatggtgggttggtggatgggagatttaatggtaggaggaggtagatgtttgtatggtatatggtggtaatagttgttttatttattttttaatttttgttatgtagttatgaggaagatgggaagtgtattgtagttta

SEQ ID NO: 141 - DNA, 4001 bp, Artificial Sequence
  chemically treated genomic DNA (Homo sapiens)
taaattataatatattttttattttttttatagttatgtagtaagagttaagagataagtaaagtagttgttgttattatgtattatataggtatttgtttttttttgttgttgggttttttatttattagtttattatagataattaagatatagattttggtttttttttttggatataagttttggaaggtaatagagtgagtagtgtagagggttttggtttaaggtttaatagttttttttggaagggaaaaaaaatttttgaaagatattttttaagaggatttttgtttgaaattgttattgaaagtagttaatatttttgtaatttaaaaatgtataaatatagaggattggaaattttgtgtttgttagaatattaagttgtgtgattttgtttaagttttttggtttgtgttttggtttttttattagttgtaaaatgggtataatatgaagttgagataatgtatgaatagtgggaggtaatgtttggttggtggtgggtggtgggtgttgggtaattattagttttaataagaagatggtgttaggagttaagtggttaagttggtttttttttgtttttggaattgtttgttttagttttttgtagggttggtattgtttgtgtttggagtggatgttggatggtggaattgtgttgttttttaatagggaagtgttatgggattgggatttgggagatttgggttttgtttgtgagttttggtttttttttttttgagatggggttgtggttggttatttaaggaggggttttgttgggaggggttgggggttggggttgggtttgggttgtgtttttttggggttttgggtttttggttttggtggtgtgggtttatgatatgttgtagagggtgttggtgtttggttttatggtttttgtttgggttgttgggtttgggagtgaaaggttggtttttggggagtttagagaatgttgtgttgtgagttttatatgagttggtgtttggtagaagtttgtgttgtttgtgtttaaattgtttgttttgtttattttatggttggtgttttttaaaatttgaatttagtgatttttagtggttgattttggaatgttttttatgtagagtgattgtaggtagggttaatgagagtatgtattgagatataaatatagtggtgatgataggaggataggggagattgatggtaaaattaattaatagataattaaagagatggggtgggaaatttttttgttttttgtttgttaatttggttgttggtttttgtgggattgtattgatgtttttaggtgttttttagttaaaatattgaagtttagtttggaatgtggatggtgtgtttgtagaatgtgttttttagaaaagttgttttttttaaatattttatgttttgttttagtaatgtagagatggtttttaaagatgaggaaatagatttatagagaatgtgataattttgtgttgtatttgtgatttttttaggaattatttatagatatatttagaatttagtttaattgtataaattttgttgatgtttggggttgtggggatggtgggattggtggggttttgagaataaggtttgggtagggtaggttttggtattatagtaatgtaattgttttaaaaaaatgtttttttttttttgttggggataataaaaatttaagttatgttttggtatgtagaataaggggaattttaattttttaaattttattttttgtattttttaaatgttttatagtgaatatgtaattaggaaaaatgttataaaattagtgattttatggaatttttgtgtattgttggtgggagtgtaaaatgttgtggttgttgtgaaaaatagtattggtggttttttaaaaaattaaaaatagaattattagatgatttagtaattttatttttggttaaatatttaaaagaatttaaatatagttagggatttgaatagatatttttatatttatgttgatagtggtattttttataatagtttgaaggtagaaatagtttgaatatatattaatagatgaatggataaataaaatggggtgtatattataatgttatttagtttttaaaaggaagggaattttgatatttgttgtaatatagatgaattttgaggatgttatgttaagtgaaataaagtagtttattaagggataaatgttgggttggggtgtggtggtttatgtttgtaattttagtgttttgggaggttaagttgtttggaattattgagtttgagtttgagtttaatttggttaatatggtgaaattttattttgttgagtgtggtggtttatgtttgtaaatttagtattttgggaggttgaggtaggtagattatttgaggttaggagtttaagattagtatggttaatatggtgatattttgtttttattaaaaatataaaaatttgttaggtgttgtggtttatgtttgtaattttagttatttaggaggttgaggtagagttgtttgaatttgaaaggtggaggttgtagtgagttgaaattatgttatggtattttagtttaggtgataagagtgagattttgttttaaaaaaaaaaaaaaaaaaaaaagagaaggggaaggagaaggaggagaaggaagaaagaaattttatttttattaaagatatatatatatataaattagtttgggtgtgtagatgtatgtttgttgttttagttatttaggaggttgaggtgggagaattgtttgagtttaggaggttgaggttgaattgagttatgattgtggtattgtattttagtttgggtgatagagtggtattttttttaaaaaaaaagaaaaaaaaaaaggataaggttgggtgtggtggtttatgtttgtataattttagtattttgggaggttgaggttagtggattatgaggttaggagattgagattattttggttaatttggtgaaaatttgtttttattaaaaatataaaaaattagttgggtgtggtggtatgggtttgtagttttagttatttgggaggttgaggtaggagaattgtttgaatttaggaggggaaggttgtagtgagttgagattgtgttattgtattttagtttgggtaatagagtaagattttgtttttaaaaaaaaaaaaaaaaaaggataaatattgtatgaggtatttggaataatggaatttatagagatagaaagtaaaatggtggttgttagtgagtaagggaggaatggggagttagtatttaataggtggggagttttagtttgagaagatgaaaaattttggatatggatggtggtgatggttgtataatattgtgaatgtgtttaatgttattgaattgtatatttaaaattggttaaaatggtaaattttatgttgtgtgtgtgtgtgtatatatatatatatatatattaattttgttttataattgggttttgtattattgtttaggttggagtatagtggtgtaattatagttaattgtagttttgaattgttggatttatgtaatttttttattttagttttttgagtagttgggattaataggaatgtattattatatttggttaattttttttttttttttttttgagatggagttttattttgttattaggttggagtgtagtggtgtgattattatttattgtaatttttgttttttgggtttaagtgatttttttgttttagttttttaagtagttaggattataggtgtgtgttattatgtttaaagtgttgagattataggtgtgagttattgtattttgttatttggttgattttttaaaaaatattttgtggtgttatggtaattttggtttattatatagtttttattatatagttatgtatatataataaaggtattatatagtttttatgtttaataatggggatatgttttgtgaaatgtgttgttagatgattttgttattgtgtaattataaagtgtatttatataaa

SEQ ID NO: 142 - DNA, 2501 bp, Artificial Sequence
  chemically treated genomic DNA (Homo sapiens)
ttagtaaaagtagttttagtgagtgattgtgaaagttaggtttgagtgggtttaagagtgagtgggaggagaggagttggaaataagtaataataattaataattaatttgtttatgggattttgttgtaaagggaaatagagaaattgggtggtagttggaggagaaagtatagatgaaaattttgtaagatgggagaaataatatgtatgttttagtggaaaaggggaaaattgatggtggggggtggtggagaattgttaaagtaatttaagttttagagggatattagtgtgttttgggttggttgtttagaagggtaagtatagtatatggggatataagtttggaggtggggagatgtgataagtggggttttggagttttttaatttttttattgaagtaaaggatatattaatagtatttattatgttagattgttttgaaaataagtgtgtttttttaaagtattttaaatagttgttggtatatattgggtatttaaatgatagtaatgatagtaattattagttattattgttttttaaatattaatttgtggaataatatgtgtttattagtttattttagtataaatgaaaatgggaaaaagaaggataatataggtatgttttaaaataaatatattttagtttgagattaagtttttttattttttaaaatgggtttttttttatgaaaagtagtggtattaaatggtaggggtttttttttttttttagtaatattgtattgaagaattgtgtatatatatttatatatatatatatatatttataagtaagtgtgtagtttagtgatttattataaggtgagtatatttatgtattattatttggattaggaaatagaatattagtagtatttggttggattttgggtttttttttttttttttttttaagtgtttttagtttgtagaatagaagaatggttatttttgtgttgggattaaggatttttttttttaattttttggtttgtgaaatttaaaagtttggtaatatgtttaatattgaggagtttaataaattttattaggttatatttttgttggaggaaagaataaaaattaatttttaaatgtattataagtttttagagttatgagaatatttttaaattgatgtgatattgattttttaagtattttttaagttatttgtttgaatgaatgattttatttttatgttatgaaatttataatattttttaaaggattttagatttttgaagataaaatgttttttgtttttttgagttaattaaaagtgtattgagatttgttatttatttatttttattgtttttgttttaaagaaagtaggtttattttttttttttaaaatatttttttaatttagtttttttatgatgatattaggtgggtaatattatgattaatttttaagataaagtgttggttatttatttaatttttagtatttagtgatttgagttgtttttttaggatataatttataaaataagattgaagaatatagagttggtatgtgtatttttatatttttgggttttaagtttttgtttattattttgtgtggttttttgtagtatgtgtatatattttttgtgattatgttaattatttattagttgaaaattagtgtttggggataattgtttttttttaattgagggtatttttttttgtggttggtatttatatttagtatatgttttatttgttttatgattttgttgatgttagggtttagttttttgggtaatttgtttagtttgattttgttttttatttattggttgtagtgttttgattgtttagtatagttattttttaggattgatagaaatttttttgttttttttttagtagtatttgttttattttttttgtgttgtgtttaataaagagtattagttttttatttttagggatatttgtgattttttttttatatttaataagtaaattagggagaaaatatatgtgtttttggaagtttattatatgaagatggtatataaaatatatttattatgattagaaatataggattaaattatgtttgttttatatttgtagtatatatttttggtttgtataaaagtaattttaaaattttagtttttttaaatagttatgtataaaatatatatatatttatatatatatatatatatatatatatatatatatatatagttatattattgttggttaaagatgtattttttttttaattaatttaaatgaggttagtgagtatttgtttgatgtttgtatttttgtgggttaggaaataaggtatgggtttttaaaattaatattttggtgttattttttggattgataagatatagatttgtatatggttttagttttattttatttagattgttttatgtatattattttagaaattttgaaaggaagtgtttgttttttgttagtgttaattatttttgttataaatggtaaatgattggaatatt

SEQ ID NO: 143 - DNA, 2501 bp, Artificial Sequence
  chemically treated genomic DNA (Homo sapiens)
aatattttaattatttgttatttatgataaaaatggttggtattaataaagaatgagtatttttttttagagtttttgagataatgtatgtggaatagtttgggtggaatggggttgaaattatgtgtaagtttgtgttttgttagtttaagaagtgatattgagatgttaattttagggatttgtgttttgttttttagtttataagaatgtaaatattaaatagatatttgttagttttatttaaattgattaaaggaggagtgtatttttggttgatagtggtgtaattgtatgtgtgtgtgtgtgtgtgtgtgtgtgtgtgtgtgtgggtgtatgtgtgttttgtgtataattatttaaggaaattggaattttaaagttatttttatataaattaagaatatatgttatagatataagatagatatggtttggttttatatttttagttatgatgaatgtattttgtatattatttttatataataaatttttaaaaatatatatattttttttttgatttgtttgttaagtgtaaaaaagaggttataggtgtttttgggggtggaggattagtgttttttattaaatatagtataagaaagataaagtaaatgttgttgaagagagggtaaagaggtttttattggttttagaaaatggttgtgttaaataattagaatattgtaattagtaagtaaaaaataaaattaaattaggtagattgtttagaaaattaaattttaatattaataggattatgaaataagtaaagtatatgttgggtgtgagtgttagttgtagagaaaagtgtttttaattaaaaagaggtagttgtttttaaatattaatttttagttgataaataattagtataattatagagggtgtgtatatatgttgtagaaaattatataaaataataggtaaaagtttgaaatttaagaatgtaaaagtatatatgttagttttgtattttttaattttgttttgtggattatgttttaggaaaataatttaggttattaagtattagaaattgaataagtgattaatattttgttttagaaattggttatagtattatttgtttaatattattataaggaaattagattggaaagatattttaaggggaaaaaataggtttattttttttgggataaagataataaaaatggataaatgataaattttagtatatttttagttaatttaagagggtaagaggtattttgtttttaagaatttgaaattttttaaaaagtattatgggttttataatataagaataaaattatttatttaggtaaatgatttgaagaatgtttgaggaattaatgttatgttagtttagaaatgtttttatggttttggaaatttatagtatatttgggaattaatttttatttttttttttagtagaagtatggtttagtaaggtttattggattttttagtgttaaatatattattagatttttgggttttataggttaggaaattaaaaaaaaaaatttttgattttaatatagggatggttatttttttattttgtgagttaagaatatttgagggagggggaaaaaaaaaatttaaaatttaattagatgttattaatgttttattttttgatttgggtggtagtgtataggtatgtttattttatgatgagttattgagttgtatatttatttgtgaatgtgtgtgtatatatatgaatgtatgtatataattttttaatgtaatattattaaaagaagaaaaaaatttttgttatttagtattattattttttataggagaaaatttattttaaaaggtggaagggtttaattttagattaaaatatatttgttttgaaatatatttatattattttttttttttttatttttatttgtattagaataaattaatgaatatatgttgttttatagattggtatttgggaagtagtgatagttagtaattgttattattgttattatttgagtatttaatatgtgttagtaattatttaaagtgttttaaaggaatatatttatttttaaggtaatttaatatgataggtattattagtatattttttattttaatgggaaaattaaagaattttaagattttatttgttatatttttttatttttaagtttatgtttttatatattgtgtttgtttttttagatagttaatttaaaatatattggtgtttttttgagatttgaattgttttagtaattttttattgttttttattattaattttttttttttttattggaatatatatgttattttttttattttataaaatttttatttgtatttttttttttagttattatttaatttttttatttttttttatagtaaaattttatgagtgagttggttattagttattattatttgtttttaatttttttttttttatttatttttaaatttatttaagtttagtttttatgattatttattgaaattgtttttgttaa

SEQ ID NO: 144 - DNA, 4001 bp, Artificial Sequence
  chemically treated genomic DNA (Homo sapiens)
ttagtttagtgtttttaatttgtttttttgattttttagttttggagttagggagtatatatattttaaagtataaattatatatttttggatagagtagtttttttgtttattattggggatagaaggggtgtttggttgtattttagatttttaaatgtggaattgagaagaatagttatgataatagaggatattttttattgggttggatattgttttttgaaaggagtatgttggttttttgttggaatgatggtgttggtagggagaattttgggtttttaggtagtgggttgagggttttggatatttttttatatttaaggggttgttaggttgttagtagggataagggagtagttatagggtttttattttttatgtgtttatggtttgtgtgtatattatatatattatgtatatgttatttttaagtagatgttttgtttattgtgtgttggagtgggagggttattttaaggtttttatttttagatgtaatttttagttttattgggattgggttgagtgattgtttaattattgtttttttggtagagatgtttttagggtgttttttggtgtattttttattggtggttgtttggtgaagtgggaaagttttttagtttttttattgattttttttttttttttttttttttattaattagtgtttattgaatatttattgtgtattgggtattgttttgtttttagtggggaatgaggttaggatgggttttttttatttgtattttggttgggggtaggggtgatggtagtatataaggttatgtaggttatatattagttgagggttgttatggaggaggaggatagagggtaaggtgatgtttatagtgataagtatagtagggtagtgattgttattggttgttattttttgaggattaggtttgtgttggatgttttattttttatagatatttgtggttagtgagggataggttttgagatgggagtaagttgttagaggttatataatttgggagaggtaagtaaggtatgaaggatgagattattttgagagtggtgggggtaatattagggtttgattaagggaaagaggtggtattagagtttttggttgttagaggttggtagggttagggagtaggtgtgagaggttattattattgttaggagagattagaatttttgtttagggagaggatagtttattaggggtttgttttaaagtaggattgttaggattagtggttaaggtttgtgaggggtaagggatagtgaggggtatggatggttgttgggaggatgaagtgttatttgttgagggtttagtaggttgagttttagatgttggttatatttaggagttgagggtggggttttggttgttggggtttttttgttttgggtttttttattttagggtttgttatagagttgatgggtggtattaaaggggtgaatgttgtttgtggtaggatggggaggttgtgtgggtttttggatagggatataggttagggaaggagtaagaggggtgtgtgtgagttgggtggggtttggtgttattttgggtttatagttggggaagaagtttgagttttgagttgttttttgtgtggggaggtttggtttaagtatttggtaaagttataggggtattttagggtgtgtttttttttgttggtaggaaaggtggatggggaggttttgatttgtggggttggtgaaagattttgtttgaggtttttaggttattttgttttgttttggttttggtgattattattatttttgggagttattgtgatatttggttttttaggtggatttttttgtagtattatgtgtagtttttagttttttggttttagtttaagtttttttttatttttttttgtaggagtgaggtagtttttgtttattgtgtttaggtattttatggtgtttttatagtttgaagtttttattttgttttggtttttgtttatttgttggtttttgggttggtttattagagtgtttttaagggaaagtaggggttaggttttttttttggtgttttttttttttgtgattagaagtgatttagtttttgtgggggtaatgagagttagggaggtgtttagttattttagggttgggttgaggtttggttatttgtgtaaaatagggtaaggttgagttttattagtgttgtttgggagaagggttttagggggtattataatagggtgattttattgaattttaattggatgtggtagaagtgagtttagtatgggggttgggtgggtagaggttttgtatatattttttttttttttatgtatttggttttaggtggattgtttaggtaatagtagatatatgtgttatattatggtgtgggttttatagtgttttatggaggagagggggttggatggattgttgttggtttattttttaaggttagtttttgttgttttgtttttagaagagtttttttttattgtttagtttgaggtggggttgtggggaggaggtttatgtttttttttgtgtttggtaggtgaagggttggatgtatagtgggagttggaggtggggggttgtagggagtatattagtgattggttttttaattttttagttatttagtaatattgttatagtaattagtaattagatggtagtagttgaggtaaatataagtggatggttttttattgttgttgaggatagggaatgattatggtaaattaggttattttgttaattagggaggtggagtgttattagtggggaggggtggttattgtttgttgtatagagtgttatgttggttggagaagaggtgttggggtaggggttgtagtgtggtttggttttatttttttgttggtattgagtgtttttagggtagttgggtttttgtttgtttggttttagtgttttttgtggtaagagggagaggtgttttattttgtgttttttgtttgggtttgttgttgttagattatgggatgttggtaaagtttagaggaaaaagaagtagtttggtggttttggagaattgattgttatttgtgtttagagagttagtggtaatgttgtgaaattaagttgtttttgttgggtattagtaatttaggtaagagtattattgttaaatagatgaagattatttatagtggtggttttaatttggaggtttgtaaggagtataagttttttattatttataatgttattgatttgttgatttgtattatttgggttttggttgtttttaggattgatttttataattttgattgtgtttatgatgttgtgtagttttttgtgttgatgggttttgttgagagtaagggtgagattatatttgagttgttgggtgttatgtgatggttttgggttgatttaggggtataggtttgttttagttgttttagtgagtattatttggaggataatgtggtttattatttgaatgatttggagtgtattgttgtagttgattatatttttattgttgaggatattttgtgtttttgggatatgattatgggtattgtggagaataagtttatttttaaggagtttatttttaagatggtggatgtgggggggtagaggttagagtgtaaaaagtggatttattgttttgagggtgttatagttattattttttgtgtggagtttagtggttatgatttgaaattttatgaggataattagatagtaagtggggttgggggtttttttttgtttgtttttgttgttgtgggtttttggaagtaagaggatttgtgaggtttaggatagtttgtagttagaaagggaattaggtgtaggtttggttttgttgtatgataattgaggtagttttagtaaggtgggggtagagggaatagggtgtggagtgtaggtgttatgttttatgtttgaagtatttagggtgtggaggttatagggtaagagagtgtgaggttttgttgggtatttatgattaatttatg

SEQ ID NO: 145 - DNA, 4001 bp, Artificial Sequence
  chemically treated genomic DNA (Homo sapiens)
tatggattgattatggatgtttggtggagttttatatttttttgttttgtggtttttatattttgagtattttaggtatgggatatgatatttgtattttatattttgttttttttgtttttattttgttggagttgttttagttattgtgtagtagggttaggtttgtgtttggttttttttttggttgtagattgttttggattttatgagtttttttgtttttaggaatttatgatagtaggaataagtagaggaaaatttttggttttatttattgtttggttatttttgtagagttttaggttgtagttgttgagttttatatagaagatgatggttgtgatgtttttgaagtagtggatttattttttgtgttttgatttttgtttttttatgtttattattttgaaggtgagttttttgaaggtgaatttgttttttataatgtttgtggttatgttttgggagtgtaggatgtttttgatagtggggatatagttagttgtggtgatgtgttttaggttgtttaggtagtaggttgtgttgttttttaggtggtatttgttggagtggttgaagtaggtttgtgtttttgggttggtttagagttgttgtatgatatttagtagtttgggtgtgattttgtttttgtttttagtggggtttgttagtgtaaagagttgtatagtgttgtaggtgtggttggggttgtggaagttgattttgagggtggttagggtttggatgatgtgggttagtgagttgatggtattgtagatgatgaggggtttgtattttttgtaggtttttaggttgaagttgttgttgtggatgatttttatttgtttgatgatggtgtttttgtttgagttgttggtgtttagtaggagtagtttgattttgtggtgttgttgttggttttttgagtgtaggtggtggttaattttttgggattgttgggttgttttttttttttttgagttttgttgatattttatggtttggtagtagtgggtttagataaggagtatgggatggggtattttttttttttgttataggggatattgagattaggtagataagagtttagttgttttggaggtatttagtgttagtaggggggtgaggttgagttatattgtagtttttgttttagtgttttttttttagttggtatggtgttttgtgtagtgggtggtggttgtttttttttattagtgatattttatttttttagttggtaaagtggtttgatttgttgtagttattttttgtttttggtgatggtgggaagttgtttgtttgtgtttgttttggttgttgttgtttggttgttggttgttgtggtgatgttgttgagtggttggagggttggagggttggttgttggtgtgttttttgtagttttttgtttttggtttttattgtgtatttagttttttatttgttaaatatagagaaaagtgtgagttttttttttgtagttttattttaggttggatagtgaaagggagtttttttgaaagtaaagtagtagagattggttttggaaaatgagttggtaataatttatttaatttttttttttttatggggtgttgtagggtttatattatggtgtaatatatatgtttgttgttgtttggatagtttatttgaagttaggtgtatgagggagaggagggtgtgtgtgaggtttttgtttatttagtttttatgttggatttatttttattgtatttagttaggatttaataaggttattttgttgtgatgttttttggggttttttttttagatagtattgatagagtttagttttgttttgttttatatgggtggttaggttttggtttagttttgggataattgagtgtttttttgatttttattatttttgtaggagttgggttatttttgattatagggaggaaaagtattaggagggagatttggtttttgtttttttttgagggtattttgatgggttagtttaggagttagtagataggtagggattagagtaaggtggaggttttaggttgtgggagtattgtgaggtgtttaagtatagtgggtaggggttgttttatttttgtagaaggaggtagaggggggtttgggttgagattaaggagttgggggttgtatgtggtgttgtggggaaatttatttgggagattagatgttatagtggtttttaagggtagtagtaattattgaggttagggtaaggtagggtggtttagaggttttaggtagaattttttattaattttgtgagttagggtttttttatttattttttttgttagtagggaggggtatattttaggatgtttttgtgattttgttgggtgtttaggttaggtttttttatatgaggggtagtttaaagtttaggttttttttttggttgtgagtttagggtggtattaggttttatttaatttatatgtattttttttgttttttttttgatttatgtttttgtttggagatttatgtagtttttttattttgttataggtagtatttgtttttttaatattatttattaattttgtgataggttttggggtgggaaggtttgaggtagagagattttaatagttaaggttttatttttaatttttgggtgtgattagtatttgaaatttaatttgttaaatttttagtaaatggtattttatttttttagtagttatttgtgttttttattgttttttgttttttatagattttgattattagttttggtgattttgttttgaagtaggtttttggtgggttgttttttttttgggtagaggttttggttttttttggtagtggtggtggttttttatatttgttttttagttttgttagtttttgatagttagaggttttaatgttgttttttttttttggttagattttgatattatttttattatttttagggtggttttattttttatgttttgtttgttttttttaggttgtgtggtttttggtgatttatttttattttagagtttgttttttattggttataggtatttgtgaagagtaaagtgtttagtataagtttggtttttagagagtgatagttagtagtagttattgttttgttgtgtttgttgttgtgagtgttattttgttttttgttttttttttttatagtagtttttagttaatgtgtgatttatatgattttgtgtgttgttgttgtttttatttttagttagagtgtgggtgaggagggtttgttttggttttgttttttattgggaatagagtagtgtttagtgtatagtgggtgtttagtaagtattggttggtggaaggagggagggagggaaggaattaatggagaggttgaggaatttttttgttttattaggtagttattgatgagaagtgtattagggaatgttttagaaatatttttgttaagagggtagtgattaaatagttatttagtttaattttagtgaggttgaaaattatatttgagaatggaagttttgagatgatttttttattttagtatatagtgggtagaatatttgtttaaagatgatatgtatatgatatgtgtaatatgtatatgaattatgagtgtatggaggatggagattttgtggttgtttttttgtttttgttgatgatttgatagttttttaggtgtggaaaggtgtttaaagtttttagtttattgtttggggatttagggttttttttattagtattattattttagtaggaagttaatatgttttttttagaaggtagtgtttaatttagtgggaggtgttttttgttgttatgattgttttttttaattttatgtttgaaaatttgaggtatagttaggtgttttttttgtttttagtggtgggtagagaagttgttttgtttaaggatgtgtgatttgtgttttgggatgtatgtgttttttggttttaaggttggggaattaggagagtaggttggggatattgggttgg

SEQ ID NO: 146 - DNA, 4001 bp, Artificial Sequence
  chemically treated genomic DNA (Homo sapiens)
ttgagattgggttatgagattggttaagattggttaattttggtattttgggtagagatagttttatttttttgaaattttggtttggttggaattttgggttttaagtgttaggattttaaagggttgggattataggtattagtattgtggttggtttagaatgaatttttaattgaagagttggaaaaattaaatgattgttaattttaatttttaaatattataggaatggaagttggatatattttgtgatttgtatgagatattgattattatataggttgttattttttttaatatgaggtgtaaggtggattggttgattgagaagatgtatgttagagattttatagtttttgttttggtaagaggtgttttaaaatgtttggatttttattaaagtaggatttagattataatatagttgttaagtgttgtgttgttgttttttttgtttaaaataaagttgttttttaattatatttgtttgttatttttttgtagtagttagggatgtttggttttatatatgttgattaaaattaaatattgatttgattggtgatttttgaattaaggtttattaatttgtagtatggtgatatggattagaaggagagagatgttattatgagggaattttggttagggttaagttgtgttttgattattattgatttgttggtaagttttttaatgttttttaaaaatttattaaaagttagttttttggggggtaggtttttaagtaatttttgttaatttgggttatttggaagagtaaaagattatattttatagtgggttatattatttagtatagtttgttattattttgtggtttatatgataggtgttaagtttttttgaattaatttttaaaatatgttattgtgttttaggtttgtgggattgatgtgtaataagtgtttttggttataaattatgatttatttattaattgtgaaaattatatttataggtgagaagttagtattttggttgtattgaaaaaaatttatatgtttttttattgtgatttgtatgaaaggtaatattaaattaaggaatagatttagtaaagttagtagtgtttagtaagatgatgtaattaaatttgtattagggaaggttgatgagaataaagtgggaaaatttgtaaatattgtttagattgtggatatagggtttttttttataattgttggttttattttatgtttgagtttttagtgatgtttttgtgtttatgtgttttttttggtgattttttttatagttgggatttttttggtgttgtttggtagtaatttgagtgaattttggtttagttatagtggttttatttttaaataaattgaattgtattttgttatatgatgtaaaaaaagattttttaaaaaatataggagttgatagtagtagttggtgatgagatggtatttagaaatggtgttgatgtaatttaggatgtggaattataagtgaaatagtatattgtttgaataaagagtgagttggtatttatatttgttttttttttgttatgattatttgatttttaagttgttttagttaaggtatttttttgtattagtatttttattagggaattttttttattaggtggtttgtattgtttggtttttaatatgtaggtagttgtttggtagttaaatatgtttagagtaatttgagttataatgtgtgaaattgagtaaaaaagtagtgataagtttgggttattatattaaatatttgtttttttattggaaaaaagtaagttttagaaaatagttaatttttgtagtatttgtttatagtttatagttttagaagtgtgttgaaatggattatataattgtttttttatttttggtgtttatatttgttttaggttgatatttgtttttggttggtttattttggtatgggttttaattttattattttaaatatgatattgttatttgttttataataatgtttaagatgtttgataaaaattttattttgtagttagataagttttgaatttttttggtattaattgtaaaggaagatttttttttttagatatgtattagtagttagtgttttagttagaagtatgaattataattttgataagtaaatagtagttggtggttaataagtggattgttatgtttagtagtttatatattatgtgagaagtaatgttttgatttttttttttatatagaattggtagagggggttgatttgggaggaaaggtgtggttataaattttgttattgaagaagataagaggattttttgtgatattgagattttttataatattatagtggaggagatgtttatgaatgtggttgattttatttaatttttgggatgagagttttggatgtagtgtttgttgttgttgaataggtgattataatgtgtattgtgtttttttttttgggaatatttgaattttgttttaatgtttataatggattagaaatatagattttgatagtaaagtgatgttagttgtgagtttttgtgaggaaagttattggttttattttttttagagttagattgttggggtgggtataaaagatggggtttgtaaaattttttttttttagaaatttattttttagttttgtagaaatggttgtattagatgttttttattatttaataatatatttgtggattaaaagatataagtgttgtataaaattagttaattatgttaaattagtatatttgtttttattgtgtttgttattagtttgagtagaaaggtttttaaaatttttttagaaagtatttgaatgtattttgtttggtattgtatttatttaataaagtatttaattagtgttaagtgtgaattggattttgttgttaagttttagtaagtaattttaggtagggtttaatttttagtaaaattgttatattgtatatgttttaatgaagtttgaatgttaaataaattgtatatttattttaaaggtgtttttggttattttatttttattataattttattatttataaaattttttatttagatatatttatgttaataattttgagataattgttgtattatagttgtataaaggttgatgagttgtaaatgtttattagtattatttgttaggtatttgttaattttttatgagaaaaatttaagaaattagtattttttaggtagttaaatgttttattgatatgtgtaaagtatttatttatggtaagtttttttgtgataatagatttttgtttattagataagttattttttataattatattatggagttgattgatgagttgagttgttgtatgatttttatttattaaattttataataaaaaaaatttttggtatgatgatttaatatttttttttttaaagttagtaagttgattttattttgattatagtttttagtttgttaaaagagttattttgataggtagtaaatattttattaatttttttagttggtattatttaggtaattgaatgtttggtattaaagatgtttttaggtgagattagatatatattttgttaattggtttttgtgtttttagttatttttgttttatatttaagttttatatttttttgggaaggttttgggagaatggaaagggttagagtaattttagttattattaagtaattaaggtgttaataattgtgtttttaaagttttttaatggttttgtgaatttttaagtttgggtatatatggattatagtttgttttggttagtggatgaagattaagtttttttttagtggttataatgattttttagaatagtggttaagattaattaaaaagattgatttttttaaaggggaagtgtttttttttttaatgtttttatgtaaagatgttattaatgagattggtttaaaaagtttataatatttagaaaattaaagaggattagtggtattagttttgttatatggaaggtttattgtgaaggt

SEQ ID NO: 147 - DNA, 4001 bp, Artificial Sequence
  chemically treated genomic DNA (Homo sapiens)
atttttatggtaggttttttatatgataagattggtattattaattttttttaattttttggatattgtggattttttaaattaattttattagtggtatttttatatggagatattgagagaaagggtattttttttttaaagaaattagtttttttgattgattttggttattgttttgaggaattgttatagttgttaggggaaaatttaatttttatttattgattagaataagttataatttatgtgtgtttaaatttggaagtttataaagttattaaagggttttaaaagtatagttgttagtattttggttgtttagtggtgattggagttattttggttttttttgtttttttaaagtttttttaggaaagtatggaatttaggtgtggaatagaaatgattgggggtatgggggttagttggtagagtgtatgtttagttttatttagaaatatttttaatattgaatatttaattatttaggtaatattagttgagaaaattgatggagtatttgttgtttgttagagtggtttttttgataaattagaagttgtggttaaggtaaagttagtttattaattttggggaaaggaatattaagttattatattaaaagttttttttattataggatttaatagatgagggttatgtagtaatttagtttgttaattaattttatgatgtggttgtagaaaataatttatttgataaatagaagtttattattatagaaaaatttgttgtaagtaggtattttgtatatgttaatggaatatttaattatttgaaggatgttaattttttaaattttttttgtaggaagttgataaatgtttagtagatggtgttgatgaatatttgtaatttattagtttttgtgtaattgtgatgtagtagttattttagaattgttaatgtgaatatatttggatggggggttttgtaaataatgaagttgtaataaaaataaaatgattaaaagtatttttaaagtgaatatataatttatttaatatttaaattttattaagatatgtgtaatatggtaattttattggggattaaattttatttaggattgtttgttggggtttagtaatagggtttagtttatatttagtattaattaaatattttattgaataaatataatattaaataaaatgtatttaaatgttttttaaaaaaattttaaaggtttttttatttaggttaatgataaatataataaaggtagatatgttagtttaatataattggttgattttatatagtatttatattttttagtttataagtatattattaaatgatagagaatatttaatataattatttttatagaattaggaaataaatttttaagaaagaaagattttatagattttattttttatatttattttaatagtttaattttaaagaggataaagttaatgattttttttataagagtttatgattaatgttgttttgttattaaaatttgtatttttgatttgttatgagtattgagataagatttaaatatttttaaagaaagaagtataatgtatgttgtgattgtttatttagtaatagtgagtattgtatttaaaatttttattttaggaattaaataaggttagttatatttatgggtattttttttattgtagtattgtagaaagttttaatgttatgaagaatttttttgttttttttagtaataaagtttatagttatatttttttttttaaattgattttttttgttaattttgtgtaagaaaaagaattagaatgttattttttatataatgtataaattattgaatatgatgatttatttgttaattattagttgttgtttatttattaaggttatagtttgtgtttttaattggagtattagttgttaatgtatatttagagaaaaaaatttttttttgtagttagtgttaaaaggatttaaggtttgtttggttgtaaaatgagatttttattaggtattttgagtattattataaagtagatgatagtattgtgtttggggtagtgaaattaaagtttatattaaagtgggttagttaagagtaggtgttagtttgggatagatgtgaatattaggaataaaagagtagttatgtaatttattttgatgtatttttggaattgtaaattgtaaataaatgttgtaaaggttaattattttttaaaatttatttttttttagtgggaaaataaatatttggtatggtaatttaaatttattattgtttttttgtttagttttatatgttgtaatttaaattattttaaatgtgtttaattgttaaatagttatttgtatgttagaaattagataatataaattatttaataagaaaggttttttaatagaaatattaatataaaaaaatgttttagttggagtaatttaaaaattaaataattatgataaaagaaaaataaatataaatattgatttgttttttatttaaatagtgtgttgttttgtttatgattttatgttttaaattatgttaatgttgtttttgagtgttattttgttattaattgttgttattgatttttgtattttttaaaaagtttttttttatattatataataaagtataatttaatttatttagggataaagttattataattaaattagggtttatttaaattgttattaggtgatattaagaaaattttaattatagaaaaaattattaagaaaaatatatggatataagaatattattaaaagtttaagtataaggtaagattaataattgtggaaaaaaattttatgtttataatttgggtaatgtttataagtttttttattttgtttttattaattttttttagtataaatttaattatattattttattgaatattattgattttattgaatttattttttgatttgatgttattttttatataaattatagtagaaaaatgtatgaattttttttaatatagttaagatgttggttttttatttgtgaatatagtttttatgattggtaggtagattataatttataattaaagatatttgttgtatattaattttgtgagtttgaaatataatggtatgttttaaaaattgatttaaaaaaatttgatatttgttatgtaggttataaaatagtagtgaattatattaagtggtatagtttattgtggagtgtggttttttatttttttaaatagtttaagttggtaaaggttatttaaaaatttgttttttaaaaagttaatttttggtagatttttaaaaagtattaagagatttattaataagttagtagtgattagaatatgatttgattttgattggaatttttttatgataatatttttttttttttggtttatgttattatgttgtaaattaataaattttaatttaagaattattagttaggttggtatttaattttaattaatatgtatgagattaagtgtttttggttgttataggagaatagtagataggtatagttaagaaataattttattttaagtagggggaatgataatatagtatttagtagttatattgtagtttgaattttgttttagtggaaatttagatattttagaatattttttattagagtagaaattgtgaagtttttggtatgtatttttttagttagttagtttattttgtgttttgtattgagaaaaataatagtttgtgtaatggttagtgttttgtataagttataaagtgtatttaatttttatttttgtaatgtttagaagttaaagttaatagttatttagtttttttaattttttagttaaaaatttattttgggttagttatagtgttaatgtttgtaattttagttttttgggattttagtatttagagtttagagttttaattagattagggttttaagaaagtgaaattgtttttatttaaaatattaaaattggttagttttagttagttttataatttagttttaa

SEQ ID NO: 148 - DNA, 4001 bp, Artificial Sequence
  chemically treated genomic DNA (Homo sapiens)
ttttttatagttttttgatgaggtgtagaattgggaaataaggggtttgggaggatttattatgtgaattttgtgataagggaaaaaagtatgagtttagtaaaagaagttttagattataatgtttgaaattgttttaggtaattaattagaatgaagttttttagttaattttttattgtatttattatatgttgattaggtgttaagatattagatttttttttttatgtgtttaagtgtttttaagttatttttattgggattggattttatttggtaataaattagatagatgttatgagtttttttttaatagaggtgatatttttaatgttattttttatttttttttaaaataagtgttgatttttgaagatagtgatttaagtttttgtagtatttgttagtgatgtgtagaataggggggttgattttagatttttgtttgtatttgtgtttgttgtttaatttataagtagagttttgaagaaaaagattatttggaattgtattatgttttgttttttttggaataatttaggaaatgtatttagttgttttggtttattaggatgaattataggttaatgttttagtaatgtgttgtgaagttggataaaagggggttttatttggggttaaaaaaattattttttttttttatattgaagttttaagtaaggatgagtgatgttgggtgtaatgtattattttttaaaatgtgttaatagttttgaggtaatttggattttattgtagttttaaaggtatttttagagttgtagtttgaaattgtatattttaaataaatttttgggggttattatgtttagtgaatttgagaatggtttttaggtgaatagattgatgttgggatagtagtagtttgtggttgatgtgttgagtttattgtattttttttttgtgtttttgggttttttggagtaagatggagtataattttgttagttaggattttaggatagggatatagttttttgaatgatggtggaagttagtgggtgttatatgggatgaagattgagagggaaatttttagaattggttgggtgtggataaagtggggaaaaaagtattgattaaatttattttagttttggagaatttaaggaataagggatatatatatgtatatatatatataggtatgaatatattagatatattttttagtttgtatattttagttttagatagattttttttttattagaggtaaagtgattttattagaagaatgtgttttttaggagttgttagatggtttgttgttttgtgtttgtttattgtggatggttgttttatgtggatgtttatattatagtgggatttatggttttatttaaaagagagttatggtttttagatttttgataagagggttataatttgaaaaggggtttttggttagtttttttaggtttagtttgagaatagaattagttttatatttttaggttatttgttatatatatttttttttatttttaattgatatgggtggggggagatttttgaaaatagtgatgttggtaatttatagttagtaaataaattatgtttttatatgtaaggatttatattaggggattttgtttataggtatttggaggttaaatttgtatgtgttttttgttaatttgagttattgtttttgtgtttttgagaataatatattttgtaagaaggaaagatgtataagtaatagtgtagtttttttagtaggtggaagttagtatggtgtgttttttgtgtaaggggagttgtgttaagtaatgtgtttggtgattgatagattttttgttttagattttggttatttttgattagtagatgtggatatggaattaagggtaattgaaggatatttattgagttagatatatattttagaataaggtttttattgttttagaaataatattttagaagatgaaattatttaggatgttttaaaaatatttatttatataaagattttgagagtaatatttatatttgtttttatattttagtttatgtgtttggggttaagttattgtgtggtatatgtgtagtttttttgaatgttttatatgttgtagtatttgtttttaggaatattaaatgaatatagggttttggaggggaagtgggggaagaatttataatgttttaaggttgtatggaattataatttagaaatgtgtattttgatttggaaggtgtttaattaagtgtttaaggggaaatatgattgagggagaggtgagaggagggatttagagggtagataggagagggttgatttttatttttttttttgtgtttagtatatttaaaaggtttaatatagttgatgggttaggaattgtatgatttggattttttttttgtagtgatttatgatgttaattgatgtagaggatagtttgtaaaagtaatagatttgtttttaattttagatagtatgagatataattttgggattttgtttttgtaatttgtttttaaaaaaaaaaaaaaaatgtttgttttgtataatataatttagattttttagagtagatgtggtatagtaatgagtaaatttaattttagatttgaagtgttttttagtttggttttgatttagttattttttgtttttttttttttttttagggtagtttaaattttattgttatataatattttaatttattattttttttttttatttttattttttttgtttgtgttatagaaagtttgtgtgttttgaagagtttagtttttttttaattaaatttatattttttttattattgtgatttttagagttagtaagaaagaaatgttttaaaaggaaatttttattttagttatttgtttggagttgaaggttgtgggttttaggttttttagtgaggtttgttgtttgtgtgttttttgaggagtgggtagttaggtagtggtggtttttttttttttttttttgttgtatgtggggttttagttatatttataagattttattattatgttggagagttgttttattttgggggtttttttaatatagtataggatggttaggggttttaggttttggggtatgtagtaaggtgaggtagatgttttagggtttagagtgttgtatagttttagtatttgggaagggatatgttagtgagaggttggaaggttaagttttaggtttggaatttaggaagttgtttagttttaggggtagttttagaagttgagtaagtgttagaatggttatgggtgttttttaagaggaattgttgggggttgggtgtagtggtttatagttgtagttttaggatttgggaggtagaggtaggtagattattttaggttaggagtttgagattagtttggttagtatggtgaaattttatttttattaaaaatataaaaaaattagttggttgtggtggtaggtgtttgtaattttagttatttgggaggttgaggtgggaggattatttgaatttaggaagtagaggttgtagtaagtagaaatagtgttattgtattttagtttgagttatagagtgagtttgttttaaaaaaaagaaaaaaaaaaaaattgttggaatttggtttgggtgagtgagtagttgtgtagttgttgtttatttataatgatagaagtagaataattgtatttgtttggggtgatgagttgaagtatatgatagttattatattgataatgaattattttggttttttttttttttttttttttttttttttgagttagagttttatttttttatttaggttgaagtgtagtggtgtaattttggtttattgtaatttttgttttttgggtttaagtgatttttttgttttagttttttaagtagttgggattataagtgtgtgttattatatttggttaattttttatatttttggtagagatagggttttattatgttggttaggttggttttgaatttttgattttgtgatttatttgt

SEQ ID NO: 149 - DNA, 4001 bp, Artificial Sequence
  chemically treated genomic DNA (Homo sapiens)
gtgggtggattataaggttaggagtttgagattagtttggttaatatggtgaaattttgtttttattaaaaatgtaaaaaattagttgggtgtggtggtatgtgtttgtaattttagttatttgggaggttgaggtaggagaattgtttgaatttaggaggtggaagttgtagtgagttaagattgtattattgtattttagtttgggtgaaagagtgagattttgatttaaaaaaaaaaaaaaaaaaaaaaaaaaaaagttaagataatttgttattagtgtagtaattgttatatgttttaatttattattttaaataagtgtagttgttttgtttttgttattgtggatgaatagtaattatataattatttatttatttaaattaggttttaatagttttttttttttttttttttttgagatagatttattttgtggtttaggttggagtgtggtggtattatttttgtttattgtaatttttgttttttggatttaggtgatttttttattttagttttttaagtagttgggattataggtgtttgttattatagttagttaatttttttgtatttttagtagagatggggttttattatgttggttaggttggttttaaatttttgatttgaagtgatttgtttgtttttgttttttaagttttgggattatagttgtgagttattgtatttggtttttaatagttttttttaaagagtatttgtggttattttagtatttgtttagtttttgggattgtttttggaattgggtgattttttgggttttaggtttgagatttggttttttaattttttattgatatgtttttttttaggtgttgggattgtataatattttgaattttgaagtatttgttttgttttgttgtgtgttttaggatttggagtttttgattattttgtattatgttgggaggatttttaaagtggagtagttttttaatatggtggtgaagttttgtaaatgtagttgagattttatgtgtgatagagagaggggagagagaattattattgtttgattgtttgttttttgggaaatatataagtaataaattttattgagaggtttggagtttataatttttggttttgggtaaatggttgagatggaggtttttttttggaatattttttttttgttggttttgagaattatggtggtaaagaaagtgtgggtttggttagaggaaggttgaattttttagaatatatagattttttgtgatgtagatagaggggatggggatagaggaaagggatggtaagttgagatgttgtgtggtaatgggatttgggttattttaaagggagaaggaagggtagagaatggttgggttagggttagattggaagatattttagatttgaggttggatttgtttattgttgtattatatttgttttagggaatttggattatgttatataaggtaagtattttttttttttttttaaagataggttatgaagataaagttttagaattgtattttatattgtttgggattaagggtaaatttattatttttgtaaattgttttttatattaattaatattgtgggttattatagggagaaaatttaggttatgtagtttttggtttattaattgtattgggttttttggatatgttgaatgtagaagaaagggtggaaattaatttttttttgtttgttttttgggtttttttttttattttttttttgattatatttttttttggatatttggttagatgttttttaggttaggatgtatatttttggattgtggttttatgtagttttggggtattatgggttttttttttattttttttttaagattttgtgtttatttggtgtttttggaagtaggtgttataatatgtgaggtatttggggaagttgtatatgtgttatatagtgatttggttttagatgtatagattgaggtataaagataagtatgaatattatttttaaaatttttgtataaataaatatttttggggtattttggatgattttattttttggaatattgtttttagaatagtaaaagttttattttaaggtgtatgtttgatttgataaatattttttaattatttttaattttatgtttgtatttattaattagaggtaattagaatttggggtagagaatttgttaattattaaatatattgtttagtgtaattttttttatatagggggtatattgtgttgatttttgtttgttaagaagattgtattattgtttgtgtgttttttttttttgtagagtatattatttttagagatatagaggtagtggtttagattggtagaaagtatatatgaatttgatttttagatatttgtgggtaggattttttggtgtgaatttttgtatatggaaatatggtttatttattaattataaattattaatattattgtttttgaaaatttttttttatttgtattagttgagaatgagagaaaatgtgtatggtaaatggtttaaaaatatgaggttaattttgtttttaggttaagtttaaaagagttaattaggaatttttttttagattgtggtttttttgttagggatttgggaattatagtttttttttgagtgaggttgtggattttattgtggtatggatatttatgtggggtagttgtttatagtgagtgggtatagagtgataggttatttagtagtttttgagaaatatatttttttagtgagattattttgtttttagtaaaagaaaagtttatttgaagttaaagtatgtaggttgaaggatgtgtttgatgtgtttatgtttgtgtgtgtgtgtatgtatgtgtgttttttgttttttgagttttttaagattgaagtgagtttggttagtatttttttttttgttttgtttatgtttagttaattttaagggttttttttttagtttttattttatgtggtatttattgatttttattattgtttggagggttatgtttttgttttaaaattttggttggtgggattatattttattttgttttagggagtttgggggtatagagaggggatgtagtaagtttagtatattagttatgggttgttgttgttttagtattagtttatttatttgagggttatttttaaatttattgggtatgataatttttaagggtttatttaaaatgtatagttttaggttgtagttttagaggtatttttaggattgtagtagggtttaggttgttttaaaattattaatatattttgagaagtggtgtattatatttgatattatttgtttttatttgaggttttaatatagaaaagggaaataatttttttggttttagatgaaatttttttttatttaattttatagtatattgttaaaatattggtttgtggtttattttaatgaattaaggtagttagatatattttttggattattttaaagaaaatagaatgtggtgtaattttaaatggtttttttttttagagttttatttgtaggttaggtagtagatataaatatggataggggtttgaagttagtttttttattttatatattattgataggtgttatagaaatttgaattattgtttttaaaaattgatgtttgttttgggggagggtaaagagtgatattggaaatattatttttgttggaggagggtttatagtatttgtttggtttattgttaagtgaagtttagttttaataaaaatgatttgaaagtatttggatatatgaagggagagatttggtgttttagtatttgattagtatatggtaagtgtagtaagaaattagttggaagattttattttgattggttatttagggtaattttaagtattatagtttaaaattttttttattgggtttatattttttttttttgttataagatttatgtggtgagtttttttaaattttttattttttaattttatattttattaggggattatggagga

SEQ ID NO: 150 - DNA, 3601 bp, Artificial Sequence
  chemically treated genomic DNA (Homo sapiens)
  unsure (3319): unknown base
ttttttatgtgaattatttgttaatatttttagtttagttttgttggattgtttgttttttttttaataattggaaggggttttttattttaggattatatttttgatttattatgaatattattttttagtttatgttttttaaaaatttgtataaatatattttagttatattgggtaatattttaaaagtagtttgtgattaggagtattaaatatttaattttattataaaattaattaattagaataatatgatataataatataggaataggtaattatagtagaatagattaggaatagatataagtatatttgggattttaaaatatgacgaagggatattttatttgaattgaggagaaagaatggattatttaattgttattttagatttttagttttatagattttgtttataagaaaatagtttttatattttaattaaaagtaaattgttaggatagggttagtttaacgttagggtatttcgacgtggtggtttacgtttgtaattttagtattttgggacgtttaggttaggagattaagattattttgggtaacgtggtgaaatttcgtttttattaaaaatataaaaattagttgggtgtggtggtgcgtgtttgtaattttagttatttgggaagttgaggtatgagaattatttgaatttaggaggtaggggttgtagtgaattaagattgcgttattgtattttagtttggcgatagagtaagattttgttttaaaataaataaataaataaaaacgttgggtttagtaaatatagtaagtaggttaaagatataggattttaaatatattttgtttttttaatttttaaggttttaaatatgcgaaattagtttttttggtttaatatatattttttatgtttgtaattttaatatatagtaataaaaggaatttgaatttttttaagattttttaaattttaatgttaatttagtaatatttttgaaataatatttttattttgtaataaaattttaattttaaggtatttatgtgttttgtatttattagtttttatgttaagtgttatattattattattgtagttaggtagatgagaaaatgaaatgttatagagattaattttttaatatttatttataatatggagttagtatttgaatataggtttttttgattataaaatttatttttttattatgtttagtttttttttttatttaaaaataatatataatgtatatataaatatatatgtatatgtaatatatgtttataaagtaatgtagaatataaagttataatattagttgtaatttaataatttatagaattttagtgaatagtttgatgtattttttttatcgtttttttatattatatatatatttataaggatttatatttaaaattagttggtttttgtttattatatatatttgagaaaagtttattttgatatttttatagtattagaaatgggaagagatatatatggtgataattattatattttacgtagtagtggtttttaaatgttgatttataggttgatgttggttttaataaagtttttattgatttaaggtgaaataaggaaaatataatgataatatgaattttttttaatgtagggattattttgtattttaagtttttttttttattgtttttttgggggagggggtggatttaaatgtttatttttttaaaattttggaaagttgtgttttattgttgtaggtgaagatgataataatgatgatattagttttttgtaaaatataataatggtaattttgtgttgttttttgttttagtttttaaaaattttgttttattgttgtatgaaatttagaagttttgtaatgattgttgattattattttatatagttttttgttaattagtagtatatgtaattaattgtataaatatttgatttagttttgttgattttgggatatagtatattgattttttatttttattagtttattgagtatattttattttttttatttatagtatttggttatggattattatgttggtggggatttgtttattttatttagtaaatttgaagatagattgtttgaagatatggttagattttatttggttgagatggtgatagtaattgatttagtttattagttatattatgtatataggtaaaatagttttttattgtatttggttgtgagttattatgtaatatttagtaatagaggtttattttttgttagatttattaattatggttttggatatatttatcgttaattaaaaaaaattattttgagatgattttggttgttttgttttgttgttgttattatttgttagtattatagaatcgatgtgtttgtttatatatatatgtatatgtatagtatttaaaagttgttatttttagaataatagatattggagattaggaaaggtgggaggaggtgagggatgagaaattatttatgggtatagggtatattatttaagtgatgggtatattatattgtataatttataattatataatatgtttatgtaataaagttgtatttgtattttttaaatttatgaaaaaaaaagttttcggtcggttacggttgtttacgtttgtaattttagtattttgggaggttaaggcgggtagattacgaggttaggagatcgagattacggtgaaatttcgtttttattaaaaatataaaaaaaaattagtcgggcgtggtggcgggtatttgtagttttagttattcggagaggttgaggtaggagaatggcgtgaattcgggaggcggagtttgtagtgagtcgagatttcgttattgtattttagtttgggtgatagagcgagattttgtttttaaaaaaaaaaaaaaaaaaaaaagtttttatttttagttagtatttttagaaattattttttaaaaaattatttttgtttaaatgtatatatgaattttattttaaaaggagtatgtattggttagtttttttatagttgagttttatatatttaaattagttggaattttagattataagttataggtttatttgttaaataagttttgtattatatattttatgttttttaagaaaatatttttaaggattgtatgtgttaaaagagattttttttgtatgaaagtgataattttgatgtttatggagtaattataaattattaatattttatatttaaaaattttaaaaatattagtatgaatttggaaggatatataaaaaataagaaataaattaaggatatattggatgatttaaaagtatttttatattttanagaggaaagtaggaaatagtagaacgttgttggtgaattaattatttaaatgagagtatttttggatggtgtaaaatgtgagaaagagaaagatgttgaggagaagtacgtaaaggggatattgttagttagaaaataaattaaaattatttttttaaagagtgatttttaaatttggtatgtattttgaattttttaagggaaaggaaaagggggtggggtttggaaaaattttaaaaaattggtttgaaagttaaattttgttaaaaaaggtttaatttt

SEQ ID NO: 151 - DNA, 3601 bp, Artificial Sequence
  chemically treated genomic DNA (Homo sapiens)
  unsure (283): unknown base
aaaattaagttttttttggtaaagtttgatttttaaattaattttttggggtttttttaaattttatttttttttttttttttttagggaatttagaatgtatgttaagtttgaaaattattttttagaaaaatggttttagtttattttttaattggtagtattttttttacgtatttttttttagtattttttttttttttatattttgtattatttaaagatatttttatttgaatgattaatttattaataacgttttgttgttttttatttttttttntaaaatgtgagggtatttttaaattatttaatatatttttaatttattttttattttttgtgtgtttttttaaatttatgttggtatttttaaaatttttaaatataaagtattaatagtttataattattttatgaatattaaaattattatttttatataaaaaaaattttttttgatatatataatttttgaaagtatttttttgagaaatataaaatatataatataggatttatttagtaaatgaatttatgatttatggtttagaattttagttaatttaaatatgtaagatttaattataaggaaattgattaatgtatattttttttgagatggaatttatatgtatatttaaataagagtggttttttaagaagtgatttttagaaatgttgattggaagtgagaatttttttttttttttttttttttggagatagagtttcgttttgttatttaggttggagtgtagtggcgggatttcggtttattgtaagtttcgtttttcgggtttacgttatttttttgttttagttttttcgagtagttgggattataggtgttcgttattacgttcggttaatttttttttgtatttttagtagagacggagttttatcgtggtttcgattttttgatttcgtaatttgttcgttttgattttttaaagtgttgggattataagcgtgagtaatcgtgatcggtcgagaatttttttttttatagatttagggggtataagtgtagttttgttatatggatatattgtgtggttgtgagttatgtaatatagtgtatttattatttgaatagtgtattttgtatttataggtaattttttattttttatttttttttattttttttagtttttaatgtttattattttaggagtgataatttttagatattatatatgtatatgtatgtataagtaggtatatcggttttgtaatgttgataaataataataataataaagtaaaataattaaaattattttaaaataattttttttggttgacgataaatgtatttaagattataattaataaatttggtaagaaataggtttttgttgttagatattatatggtaatttatagttaggtataatgaaggattgttttatttgtgtatataatgtagttgatgaattgagttaattgttattattattttagttaagtaaaatttagttatatttttaggtaatttatttttaaatttgttgagtagagtaagtaaatttttattaatataataatttataattaggtattgtgaatgaaaaaaataaaatgtatttagtaaattaataagggtgaaaaattaatatattgtattttaaggttaataggattgggttaaatatttatgtagttaattatatatgttgttaattaataagaaattgtgtaagatgatgattagtagttattataaaatttttaaattttatatagtagtaaaataaaatttttaaagattggggtagagaataatatagggttattattgttgtattttgtaaagagttaatattattattattattatttttatttataataatggaatatagttttttaagattttagaagaatgaatatttgaatttatttttttttttaaaaaaataatgaaagaaaaaatttggaatataggatagtttttatattgaaagaaatttatattattattatgttttttttattttattttggattagtaagaattttattagaattagtattagtttatagattagtatttagaaattattattacgtagaatatagtaattattattatatgtgtttttttttatttttaatattgtaaaaatattagaatgggttttttttaggtgtatataataaatagaagttaattaattttagatatggatttttatgggtatgtatgtggtgtaaagaaacgatgagaagagtatattaaattgtttattgagattttgtaggttgttagattatagttgatgttataattttatgttttatattgttttataagtatgtattatatatatatgtgtatttgtgtgtatattatatattatttttaagtgagggagaaaattagatatagtggaaaaatgggttttgtagttagagaaatttgtatttaaatattgattttatgttgtaagtggatgttgaaaaattaatttttgtgatattttatttttttatttatttaattataataatgataatgtagtatttagtatgaaggttagtgagtataagatatatgaatgttttgaaattaaggttttattatagaatgaagatattgttttagggatattattgagttgatattaagatttaaagagttttgaaaaaatttaaattttttttattattatatgttaaaattataaatataggaaatgtgtgttaaattaaagaaattaatttcgtatatttaaagttttgaaaattagggaagtagaatatatttaaaattttgtgtttttggtttatttgttgtatttattaggtttaacgtttttgtttgtttgtttgttttgagatagagttttgttttgtcgttaggttggagtgtagtggcgtaattttggtttattgtaatttttgttttttgggtttaagtgatttttatgttttagttttttaagtagttgggattataggtacgtattattatatttagttaatttttgtatttttagtagagacggggttttattacgttgtttaggatggttttgattttttgatttggacgttttaaagtgttgggattataggcgtgagttattacgtcggggtattttaacgttgaattgattttattttgataatttatttttgattaaagtgtgaagattatttttttatagatagagtttataagattaaaagtttaaagtaatagttaaataatttattttttttttttaatttaaatgaaatgttttttcgttatattttaagattttaaatatatttatatttgtttttaatttattttgttatggttatttatttttatattattatattatattgttttgattggttaattttatagtaaaattgaatatttggtatttttaattataaattatttttaaaatattatttaatgtagttaaggtatatttatataagtttttaaaaaatatagattgagaggtaatatttataataggttaaggatataattttaaaataaagagttttttttaattgttaagagagggataaataatttaataaaattaggttaagaatattaatagataatttatataagagg

SEQ ID NO: 152 - DNA, 2295 bp, Artificial Sequence
  chemically treated genomic DNA (Homo sapiens)
gattttagattgtttttttagtaacgtgcggtttattaggaatacgtagagttgacgtttattttagagggttgttgagttaatttaagaaggtatttagtaggttgaggggttgttatattagttttgtgtagtagagggggtgtttattatggggatcgaggagtaggtattggtaaatgtttgatttagaaagtagtttgggttttggtttttgtaatttattttttaggaatttaggttagttggtagcgtagggtttaggttttggaggtggtgaaataattttttttttttcgatttttgtttttcgtatattttgtttgttagagttattttttatttaatttgtatttagtagggtgaggagttgttatgttagttttgtgtagagaaaattattgattaggggtttgttatgttttttgaaaggtattatgtaaagtttagaaaaagatcgagaatgttaagatatgtttattatgtttaaaaagtttgtaaaggggtagtatttaggaatttaatatattttagtgtaatttgagttgtaattgatgtaggaataatatgttttggggaaatagaggtaggaatagttttttcggttggagaaggtttaggaagttttacggagggggtgatatttgggttggattaggaggtaagagtttattgagtacggaagagatagtaggtattttaggtaggaggatacgtgggtagaggtagagaggatgtttgttatggtcggggagttttgttaagtgttaaatggttatattatgggtaggatagtttggtagggaaatgtagagtagtgggcgagttggatagaggtgggtagaagggttttgggtatggggtttaggttttgggatttgttttttagtggtggagaggtttgggtgggttataagttaggagtaatattttggaggtgttggaaagattattttgagggcggcgaggggttgattaagttaggaggtagggagatagtgtaggttattattagtttaggtaaagtatgataaaggtttaggagcgaggatagagggatggaggagaggggatattttcgaggtaggatatatgggttttgtataatttgtttcgtttaataatttgtgattatttattttagtttttaggttttgttttttgaggatatttttgggtttttaaaagggtttaggatttagaagcgttttagttgatgtttgttgttatgggtagggtatatttgatttttattttatttcgttttatttattcgggtttattagtattttatttgttttattatggttttggcgaggattttagttttgcgcggtttatttagtatgtttgtcgtttttaggaagatttgggttcggtttgtaataggttttaggttttatttttttcgggtagttagggtagttttaatggttttgttgagtaggttttaaagggagagggagaggttggggattgttatttgtagcgggaaaggttttggggagtgagcgagggaggagagatttgggaggttatttttttttattcggggataatgtttgtttttttgggtttttagttttttgttattatagttgttaataatagcgttttattagagtttgtagtggttgttagtttgaagtttgaagggttcggttaggttggttagtttttcgaggttttggtattgagtttcgtagttgttatattggttttatttttttttatggtttaattaaaattttattttatttttgggatttggtgttttttaatttattatttagaaatttgaggttaattggagtttgagatacggttttgttgttggttttttagattttaattgtttttatcgttatataatgttagtttttggatttttagttattttagttttttttgttggttttttttagtgttaatttttggtttagttttttattaatggtgtttttaattgttttgatttagttttttagaatttattttttttttagtttaaggtttgttttattataatgggtatgtttgggaatgttttagttttggttgaggtagtttgtgtttggtttaagttaatttttgtatgtttggtttagttaaagatattatttagggatttttttagtgttagttattttttgtttatttatttattatggttaaagaaggatatagtaattgatgttttttgttttcgttatattagtagttggtagggtagagtaggggtagtaattttaatttcgggttattaggtatataggtttatttattttgtttgta

SEQ ID NO: 153 - DNA, 2295 bp, Artificial Sequence
  chemically treated genomic DNA (Homo sapiens)
tgtagataaggtgagtgagtttgtgtgtttggtgattcggggttagggttgttgtttttgttttgttttgttagttgttgatatggcgggggtagggggtattagttgttgtgtttttttttggttatggtgggtaggtgggtagggggtggttgatattgagggagtttttgggtgatgtttttgattgggttaggtatataaaggttaatttgagttaaatataagttgttttagttagggttgagatatttttagatatgtttattgtggtggggtagattttggattggggaggaggtggattttggaaggttgagttagggtaattggagatattattgatggaaagttaggttaagaattggtattggaaagggttagtaggaggggttggggtggttgggggtttaggaattggtattgtgtggcgatgagggtagttggggtttgggaggttagtagtagagtcgtgttttaggttttagttgattttaagtttttggatggtgggttaaggggtattaggttttaagaataaggtaaggttttgattagattatgagagaaagtggagttagtgtaatagttgcgggatttagtgttaaggtttcggagagttgattaatttggtcgggttttttaggttttagattggtagttattataggttttgatgggacgttgttgttggtagttatggtggtagggggttgagggtttagggagataggtattgttttcggatggaagagagtggttttttaggttttttttttttcgtttattttttagggtttttttcgttgtaggtggtagtttttaatttttttttttttttttagagtttgtttaataaagttattgaggttgttttggttgttcggaaagagtgggatttgaagtttattgtagatcgggtttagatttttttgaaggcggtagatatgttgagtgggtcgcgtagggttgagattttcgttaagattatggtgggataggtgaggtgttggtgggttcgggtgggtggggcggggtggggtgggagttaggtgtgttttatttatggtagtagatattagttgaagcgtttttgggttttaagtttttttggggatttagagatgtttttaagggataaggtttaggagttgggatggatgattatagattattaggcgagatagattgtgtagagtttatgtgttttgtttcggaaatgtttttttttttttatttttttgttttcgtttttaggtttttgttatgttttgtttggattggtggtggtttgtattgtttttttgttttttagtttggttagtttttcgtcgtttttagagtggtttttttaatatttttaggatgttatttttggtttatgatttatttagatttttttattattgagaggtaagttttaagatttgagttttatatttagggtttttttgtttatttttgtttagttcgtttattgttttgtatttttttgttaagttgttttgtttatagtgtagttatttggtatttagtaggatttttcggttatggtaggtattttttttgtttttgtttacgtgtttttttgtttggaatgtttgttgtttttttcgtgtttagtgaatttttattttttggtttagtttagatgttatttttttcgtgagattttttgagttttttttagtcgaaaggattatttttgtttttgtttttttagagtatgttgtttttgtattagttatagtttagattgtattggagtgtattgagtttttaggtattgtttttttataagttttttggatatagtaaatatgttttgatattttcggtttttttttgggttttgtatgatattttttaggaggtatagtaagtttttgattaatggttttttttgtatagagttggtatgatagttttttattttgttaaatgtaagttgagtgaggagtggttttagtaggtagagtgtgcgggggataggagtcgagggagaaagggttattttattatttttaggatttgagttttacgttgttaattaatttgggtttttgaagggtaaattgtaggagttagaatttaggttgttttttggattaggtatttgttaatgtttgtttttcggtttttatggtgagtattttttttgttgtatagagttggtatgatagttttttagtttgttaaatgtttttttagattggtttagtagttttttggggtgggcgttagttttgcgtgtttttggtgagtcgtacgttgttgggaagatagtttaggatt

SEQ ID NO: 154 - DNA, 2657 bp, Artificial Sequence
  chemically treated genomic DNA (Homo sapiens)
ataattttggggtggggtgggaaggaagttaataaaaagtaagttgatttgtgttgtagatttttggggaggtttaggaatttgaagtattgggttttttttgggatattggtttttgggttagtttaaaatagggattagttaaaaatttgagaagtagatttttttttttagtataggagtaaattgtgttttttttttttattagaatattgtggatgtattttttagaggggttaaacgagaggttttgggtttgagtttattaatattaggtatagttgagggtggaggtaagattttatattaagaataggattaagtaaaattttttatgttgaatggtgattttttttttttattattttttttgtttaattgttagaatgttaataggtaggagagtagatatgttttttttgggtagttgattaggtataggaaagatttataaatttattggtttttttataatgaaatagttagttgttttgttattttacggtgaaggtttttagtagttaagttttattagtaaatagagattttagtttttagttttttgttattaaataaaaagttaaggattgttaaatgtatgtttataaatattagttttataagatattagggtgtgattttaatagttttgatttcgtttaggagtcggtgtttttgatttttttggggttaagttttttgttgtggtttttgtttgttgttttggtgaagtattgaagagagggaaaataattagtataaattttttttttttttttgagatagagttttgttttgttgtttagggtagaatgtagtggtataatttcggtttattgtaatttttgttttttaggtttaagtaatttttttgttttagtttttgagtagttgggattgtagatatgtgttattacgttttattaatttttgtgtttttagtagagatgtggttttgttattttggttaggttggttttatattgttgattttaagtgatttatttaatttggttttttaaagtgttggtattataggtgtgagttatcgtgtcggttttaattagtataatttgtgatgttatggttttagatttaaatgttaggagatttttatagaaataaaatttaatgagtgtttgtatttgaattttgttatttaggatttattgatagttttttttttttttttattttttttttggggatggagtttttttttgttatttaggttggagtgtagtggtataatttttgtttattgtaagtttcgtttttcgggtttatattatttttttgtttcggttttttaagtagttgggattataggtattcgttattatatttagttaattttttgtatttttagtagtgatgggattttattatgttagttaggatggttttgattttttgatttcgtgatttatttgtttcggttttttaaagtgttgggattataggtatgagttatcgggttcggttaataatttttgaatattgatagtttattgaaatttgtaggtagatttaggggagattaaaggattgttttttagattgggaaagaaatagtttttttttttgtattttgatttgttatttttgattaaaaaatatgttatattaatttaaaacgtttttttttttttttttagtgataaatgttgtttattttttttataatggaataataattttattaatattagatgaagatagaattttacggaaaagaattagtaaaacgttaaatatgattataagttttgaagagaaaagaaaaattattggggatatttttgttaaggtatttttgtttttaatatttttaatatgtattatttttgatgtgaattttagtatttgtttttttttgttattatattaaataattaaattagttaattttaatttttttttttatgtggttgagagttttattgtatattgttattatattgattagtagaaattgttttatgtttttttgttgttgtttggttttttttttgtttttttgagatagagttttgttgtgttattaggttgggttggagtgtagttgtacgatttcggttcgttgtaatttttgttttttgggtttaagtgatttttttgttttagttttttaagtagttgggattataggggtgtattattatgtttagttaatttttgtatttttagtagagacgggggttttattatgttggttaggttggttcggattttttgattttatgattcgttcgttttagtttttcgaatttttgggattataggtgtgagttattatgtttagttaattgttttatgttttaataaatatgtttgtttatattgttaggttattattttaagaatagatgtttttaagagtagatgtatttagtttattatagattttaatttattgattattttaatggttaattttaagtttttgaatggaatgtttatatatttttgtttttgtttttttttttttttggaggcggagttttgtttttgttatttaggttggagtataatggagcgattttggtttacggtaatttttatttgttgggtttaagcgatttttttgttttagtttttcgagtagttgggattataggtatgtattattatgtttagttaattttttttttttt

SEQ ID NO: 155 - DNA, 2657 bp, Artificial Sequence
  chemically treated genomic DNA (Homo sapiens)
aaaaagaaaaaaattagttgggtatggtggtgtatgtttgtaattttagttattcgggaggttgaggtaggagaatcgtttgaatttagtaggtgaaagttgtcgtgagttaagatcgttttattgtattttagtttgagtgataagaataaaatttcgtttttaaaaaaaaaaaaaaataaaaataaaggtatgtgaatattttatttaagagtttgaaattagttattgagataattaatgaattaaagtttatgataagttgaatatatttatttttaaagatatttatttttaaaataatagtttggtaatgtaggtaaatatgtttattaaaatataaaatagttggttgggtatagtggtttatatttgtaattttagaagttcgggaggttgaggcgggcggattatgaggttaggagattcggattaatttggttaatatggtgaaattttcgtttttattaaaagtataaaaattagttgggtatgatggtgtatttttgtagttttagttatttaggaggttgaggtaggagaattatttgaatttagaaggtagaggttgtagcgagtcgagatcgtgtaattgtattttagtttagtttggtgatatagtaagattttgttttaaaaaaataaaaaaaaaattaaataataataaaaaaatataaaatagtttttattggttaatataatgataatatataataaaatttttagttatataagaaaaaggattaaaattagttaatttggttatttgatatagtgataaggaaaaataaatattaagatttatattaaaaatagtatatgttgaggatattaaaaataaaggtattttaataaaagtatttttaatgattttttttttttttttaggatttgtggttatatttaacgttttgttaattttttttcgtggggttttatttttatttgatattggtagggttgttgttttattgtagaaagaatgagtagtatttattattggaggaaaggggagaagcgttttaaattggtataatatgttttttaattaaaaataataagttaaaatatagaaagaaaagttattttttttttagtttgaagagtagttttttgattttttttaaatttgtttataaattttaataaattattaatatttaagaattattggtcgggttcggtggtttatgtttataattttagtattttgggaggtcgagataggtggattacgaggttaggagattaagattattttggttaatatggtgaaattttattattattaaaaatataaaaaattagttgggtgtggtgacgggtgtttgtagttttagttatttgggaagtcgaggtaggagaatggtgtgaattcgggaggcggagtttgtagtgagtagagattgtgttattgtattttagtttgggtgatagagagagattttatttttaaaaaaaaaataagaaaagaaaaagaattattaataaattttgagtaatagaatttagatataggtatttattaaattttgtttttgtgagaattttttggtatttagatttagggttatgatattataaattatgttgattagggtcggtacggtggtttatatttgtaatattagtattttgggaggttaagttgggtggattatttgaggttagtagtgtgagattagtttggttaaaatggtaaaattatatttttattaaaaatataaaaattagtggggcgtagtggtatatgtttgtaattttagttatttagaggttgaggtaagagaattgtttaaatttgggaggtagaggttgtagtgagtcgaggttgtgttattgtattttgttttgggtaatagaataagattttgttttaaaaaaaaaaaaaaaatttatgttgattgttttttttttttttagtgttttattagagtaataagtagaagttatagtaagaagtttagttttaaagaagttaaaagtatcggtttttaaacggagttaaagttgttggaattatattttagtgttttgtaaaattaatatttatgaatatatatttaataatttttggttttttatttaatgataagaaattaaaaattaagatttttatttgttaataaaatttagttattggaggtttttatcgtaagatgataaggtagttggttattttattgtggaaaagttagtgaatttgtaggttttttttgtatttggttaattatttagagaagatatatttatttttttgtttattggtattttggtagttaaatagaggaagtggtaggaagagggaattattatttagtatagagaattttatttaattttgtttttaatgtagagttttatttttatttttaattatgtttggtattagtaggtttaagtttagaatttttcgtttagtttttttagagaatatatttatagtgttttgatggggaaggagagtatagtttgtttttgtgttaaggaaaaggatttgttttttagatttttaattaatttttgttttaggttaatttagagattaatgttttaaaaagaatttaatgttttaaatttttgagtttttttagaagtttatagtataaattagtttgttttttattggttttttttttattttattttaaggttgt

SEQ ID NO: 156 - DNA, 4001 bp, Artificial Sequence
  chemically treated genomic DNA (Homo sapiens)
ttataggtggaatggttagtattttgattatgttttggggtgtttgttttaattgttcgagataattggattttttaaaaatgatggtggagtttaatggtttttagttttgtaggtttttgttatatttaatattgagaggttttggtaggttaagttggtttggaaatgtttggttttgattttgtgttttgtttgaggttaagagattttagttttagttttagatttattatttatacgtgtgttttgaaattatttagtatttttgagatgtgttttatttattttataatattgtttgttttgtagttatgagatgttttatagtatagagttcgtttatatttagtgtttattaaaagttaagtgagtttagattggtttttaatattttgggttatttattaatgatatttgttaataatgttggttttttaggatttattttttgttttgtttgtttgtttgttttgttttgttttttgagatagttttgttttgttatttaggttgtagtgtagtggcgcgatttcggtttattgtaatttttgtttttagggtttacgttatttttttgttttagtttttcgagtatttgggattataggtgttcgttattatgtttggttaattttttatatttttagtagagacggggttttattgtgttagttagggtggtttcgattttttgattttgtgatttgttcgtttcggttttttagagtgttgggattataggtgtgagttatcgtgtttagtttgggatttgtttttaagtattaataaattaatgagaagaaaatgattgatatttattgggtagtttttatatgttttttatatattttgttttttaattttatatatatgattttagtaatttttatgtattaattagtatataatttgattttaataaaagaaaatttagattaattatagtttaaataataaaatattaaattattttatgtaatgagaagtttgaatggtggttttaataataatatgaagttttaacgatttagattttttttttgtttttattttgttatttttaatttgttgattttttatttttagttttatatatttaaaatggttgttgtagttttaattattatatttgtatataaggaaagaaaagaatgagtagatggttattttttttttgaggaagggaattttttttagaagattttagtaggttttttttatgttttattggtcggaattggattagaggtatatttttaggttagtaaatggagaaattatgagtattattttttttggggttatgtttatagggattataaattttttttatgaatataagtttgttgttatttttaagtagttatatatgttttagtattttttgttaataagttataggaaaagagaagagaaggagtaattgttatttaaattttagtgtcgagtatttttattgagatttggagatgttgagaatttgttaaggtgtgagaggagttgtaaggaggttattgtggttgggtatggtgtacgaaagggagagaggaagaagtgtatagggagttggttggtttaggggttacgttaggattggggattttgtgttgtgtgatgggtaggttttggatagttgtatttagaagatgatttatatatgacgttagtttaaggattgttttgagatgtgtggatggtagaaggtgggtagggaggttgggtattagttaggaggttgtggtagcggtttttatggggagtatagggttggattaggatagtttatagaagatattttatttttttttttgtttaaggaagagatttagtggtagtagtgtaataagggtataggttaggaaatttaattttttagggatagtaagtatttagagatacgtggggatagttttagtattaaacggtttttgattaatgagtagagacggtaaatagtaaatgcgttatcgtggtttttacgtgttatgaaggtgatgttgtaatttgagttttagagtttattttatttgtgaatttttattatttttagatgggtggattgaaagttatttttttcgtttgtagttaggtagaggggagtgtaagagggtaaatgaaaattagaagtagggttgggcgtaatgttttacgtttgtaattttagtattttgggaggttgatgtgggcggattatttgaggttaggagtttgagattagtttggttaatatggtgaaatttcgtttttattaaaaatataaaaattagttgggtgtggtggtatatgtttgtaattttagttatttaggaggttgaggtaggagaattgtttgagtttgggagatagaggttgtagtgagtagagatcgcgttattgtattttagtttggtcgatagagcgagattttgttttaaaaaaaaaaaaaaaaaaaaaaaaaaagaaaagaaaagaaaaagaaaaagaaaaggaaaaagaaaattagaagtaggagtagtttgaagaaatgatagggagttgattttttattgggagtttttttaaagtttatatattcgtttgtttggggtaatagtattttttcggatattttgtatttttttatgtttttttttttttatagtagtgaaagatttaggtaggatgattttagtttttttgtgagaattttatattttagtgtgaagttatagttttgtaattttttttttaagaattgttagagttggggaggttggttaagtttaggttggaggtggggatagagggaagaaagaaaaaaaaaaaagagagagaggtaggaaaagtttttttagaggaaaatgtagggtttgttttttattttgacgttagattttgttttaataaaattttttaagggttgcggaagaggtatatttggtgtttttgatgggtcggttagtttgggtttagttttttcgagaggtggtcggattttttgggttgttcggtcgatgtttgtgttattgacgtttaggtatgaggtggtttttgttttggacgttggtagtagtgatagtagtagtcgttagtatcgttttggttacggtgagttttgtttggaggggtttagagggagatttagtttttttttttattgggttttgttatatgggggttggtgggtaggatgaaaagggttaggaaggtttggggttggaaggtggttatttatagggtaaggatagagtttagggtgaggagttagttgtttaggttggttgaagttggtagggtgaggaggacggtgcgatatttggggaaataaattgtataggtttagtttgttttttttttttatttgaaatagtgtagaaagaacggggtttttagtagaattgggagttaggggttcgggttttagattcgttttcgtttaatttggttgtgtggtttcgggtgggttatttattttttaggagtagcgtaaagcgacgaagttgttaggtgatttttagagtttttgagtttgaaaattttaagattttaagtattggagatgttgcgaagatgggagatggaaaaagttaaaaaaaattggaaagaaaaatgttagtttttaataaaagttttttattgagtaaatagtgtttagggtgatgtttaattttaattgttgttattttcggtttgtatagttttttgtagtttgtagagtgtttatatttgggttttgtttatgaagtttgttgttttagggtgggggtgatgtgggtattttagagttttttttttttttatttgtattttagggtatattaaggggaagggataaaggtttgtatttttaaaagttaggggagttatatatgtgatcgtgtagagttagtttgttagggttaggtatggtgaggaaaaggtagaggtaggtagtgtaaggagggtaggaggtgggtatttggtagtttttgagttttagattttatagtttagggtaggatttgtttttggtagaatagtttagagacggaggggtgatg

SEQ ID NO: 157 - DNA, 4001 bp, Artificial Sequence
  chemically treated genomic DNA (Homo sapiens)
tattattttttcgtttttaggttgttttgttaggagtaggttttgttttgggttgtggaatttggggtttagaagttgttaggtatttattttttgttttttttgtattgtttgtttttgttttttttttattatgtttggttttagtaggttggttttatacggttatatatgtgatttttttggtttttggaggtgtagatttttgttttttttttttggtgtattttggggtgtaggtggaagagagagagattttggggtgtttatattatttttattttggaatagtaggttttataggtaggatttaagtatggatattttgtagattgtagagggttgtgtagatcggaggtgatagtagttggggttagatattattttgagtattgtttgtttaataaggagtttttgttgaaagttggtatttttttttttaattttttttggttttttttattttttattttcgtagtatttttaatgtttggagttttggagtttttaaatttagagattttagaagttatttaataatttcgtcgttttacgttgtttttggagggtgagtgatttattcgaggttatatagttaggttaggcgaagacgggtttggagttcgggtttttgatttttagttttgttgagggtttcgttttttttgtattgttttaggtggggagagagggtaggttggatttgtgtagtttgtttttttaagtgtcgtatcgttttttttattttgttagttttagttaatttgggtagttgattttttattttgggttttgtttttgttttgtaagtggttattttttagttttaaatttttttggttttttttattttgtttattagtttttatgtagtaggatttagtagagaagggagttgggtttttttttgagtttttttaggtaggatttatcgtggttaggacggtgttggcggttgttgttgttattgttgttagcgtttagggtaggaattattttatgtttggacgttagtggtataggtatcgatcgagtagtttagaggattcgattatttttcgggggagttgggtttagattggtcggtttattaggagtattagatatgtttttttcgtagtttttggggggttttattaaagtaagatttgacgttagggtgaaggataaattttgtatttttttttgaaaaaattttttttgtttttttttttttttttttttttttttttttttttgtttttatttttagtttgagtttggttagtttttttagttttgatagtttttaaagggaaagttataaggttatgattttatattagggtgtgaaatttttatagaggagttggggttattttgtttaggttttttattattgtagggaggggggagtatgggagggtgtaggatgttcgaggagatattgttattttaggtaggcgggtgtgtgggttttgagagggtttttagtgggaaattaattttttgttatttttttaggttgtttttatttttggttttttttttttttttttttttttttttttttttttttttttttttttttttttttttttttttttgagatagagtttcgttttgtcggttaggttggagtgtagtggcgcgatttttgtttattgtaatttttgttttttaggtttaagtaatttttttgttttagttttttgaatagttgagattataggtatgtgttattatatttagttgatttttgtatttttagtagagacgaggttttattatgttggttaggttggttttaaatttttgattttaggtaattcgtttatattagttttttaaagtgttgggattataggcgtgaggtattgcgtttaattttatttttggtttttatttgtttttttgtatttttttttatttagttgtaagcgaaagaggtggtttttagtttatttatttagagatgataggaatttataaataaaatgagttttgaggtttaggttatagtattatttttatgatacgtgaaagttacggtaacgtatttgttgtttgtcgtttttgtttattggttagaagtcgtttggtgttggagttgtttttacgtgtttttggatgtttgttatttttggggggttgggttttttggtttgtatttttattgtattgttgttattgagttttttttttgggtaagaaaggagatgggatgttttttatgggttgttttagtttagttttgtgttttttatggggatcgttgttatagttttttgattgatatttagtttttttgtttattttttattatttatatattttagagtaatttttgaattagcgttatgtatagattattttttggatataattgtttaaagtttgtttattatatagtatagagtttttagttttggcgtggtttttgggttagttagttttttgtatatttttttttttttttttttcgtgtattatgtttaattataatggtttttttgtaattttttttatattttggtaagtttttagtatttttaggttttagtaggaatattcgatattgaggtttaaatgatagttatttttttttttttttttttttgtagtttattaataagggatgttgaagtatgtgtggttgtttggaggtagtagtaggtttgtgtttatggaagaggtttatgatttttatagatatgattttagaagagatggtgtttatgatttttttatttattgatttggggatgtgtttttgatttaatttcggttaatgagatataagggaaatttgttagggttttttagaaaagatttttttttttaggaagagaatgattatttatttatttttttttttttttgtgtgtaaatgtgatggttggagttgtagtagttattttgggtatatgaggttgagaataaaaagttaataaattgaggatggtagagtggaagtaaaaaaaaggtttgagtcgttgggattttatgttgttgttggagttattatttagattttttattatatgaaataatttaatattttattgtttaaattgtagttagtttgaatttttttttgttggagttaagttgtatattaattgatatatgaggattattaaaattatatatgtaaaattaaagggtagggtatgtggggggtatgtaaggattgtttaataaatgttagttattttttttttattaatttattgatgtttaaaaataaattttaggttgggtacggtggtttatatttgtaattttagtattttgggaggtcgaggcgggtagattataaggttaggagatcgagattattttggttaatatagtgaaatttcgtttttattaaaaatataaaaaattagttaggtatggtggcgggtatttgtagttttaggtattcgggaggttgaggtaggagaatggcgtgaattttggaggtagaggttgtagtgagtcgagatcgcgttattgtattgtaatttgggtgatagagtaagattgttttaaaaaataaaataaaataagtaaataaataaagtaaaaaataaattttaggaggttagtattgttgataggtgttattaataaataatttaaggtgttaggggttaatttaggtttatttggtttttgatgaatattaagtatgaacgggttttgtgttgtagagtattttatgattataaggtagatagtgttatgaaataggtggaatatattttagagatgttagatggttttagagtatacgtatgagtagtagatttgaggttgaaattaaagttttttaattttagataaggtatagagttaggattagatatttttaagttagtttgatttgttaaagttttttaatgttaagtgtaataagagtttgtagagttggaagttattgaattttattattatttttaggaaatttaattgtttcgagtaattgaagtaggtattttaaaatatgattaaagtgttgattattttatttgtgg

SEQ ID NO: 158 - DNA, 2501 bp, Artificial Sequence
  chemically treated genomic DNA (Homo sapiens)
agttattttttaaaatggataaaagttaataaagacgatagaaggatagtaagtgagtatatgagaagatgttttatattattagttattagggagttgtaaatgaaaattatagtgagatattattttatatatagaataattagaattatataaaggttgaatatattaattgttggtgaagatgtggagaaattggaatttttatatattattggtaggaatgtaaaatggtataattgttttggaaaatagtttggtatttttttttttttaagatggagttttgttttgttgtttaggttagagtgtagtggtgtaattttagtttattgttattttcgttttttgagtttaaggaattttttttttttagttttttgaatagttgagattataggtgtgtgtttttttagttagttaatttttgtttttttagtagagagggggtttttttatgttggttagggtggtttggaatttttgttttggtgatttgttttttttagttttttaaagtgttgggattataggggggagtttttatgttcggtttagtttggtattttttaaaaagttaagtgtatttattttatagatgtgatttagttattttatttttaggtatttatttagaaaaaaaaatatatttatataaagatttgtatatgaatgtttaaaatatttttgtttttaatagttaaaaattggagaaaagttaaatgtgaaaaataaatttaataggggaataaattggtatattaattttttggaattttaagtaaaaaaaaaaaaaaaaaaaaaaaaaaaaaaaaaaaagaattatggatataagtaataatatgggtaaatttgaaagtagtgaaagaattagattaaaaaaatatatattgtatgattttatttatatcgaattgtagaaaacgtaaattaatttgtagtaataaatcggtgggttaggtatagtggtttatgtttgtagttttagtattttgggaggtcgaggtgggcggattatgaggttaggagatcgagattattttagttaatatagtgaaattttgtttgtttgtattaaaaatataaaaatttattaggcgtgatggtacgtgtttgtagttttagttacgcgggaggttgaggtaggagaattttttgaatttgggaggtagagattgtagtgagttgagattgtgttattgtattttagtttggtaagagcgagattttattttaaaaaaaaaaaaaaaaaaaaaaaaaaaaattagtggttgttcggtagggtgaggttgggaaggaggagtgagaaaggggtgggaaaaattgttggggtagagagatttggttaattggattgtggcgatggttttttttttacgttttatatgtgtgtagtttatgtttatttttttttagtaacgttgttgaagttgggtagtttttttatattgagataaacggtattgaagttagaagtattttaggattttttttgttttttatatattaggggttaggttttatattttttattaaaaaattagagtaagagatatttttaatttagaaatgtattagagaatattttaaaaattatattcggtcgggtgttgtggtttatgtttgttattttagtattttgggaggtaggtagattatttgaggttaggagtttaagattagtttggttaatatggtgaaagtttgtttttattaaaaatataaaaattagttaggtgtgatggtgcgtgtttgtaattttagtaaatcgggaggttgaggtaggagaatcgtttgaatttgggaggtggaagttgtattgaattaagatagtgttattgtattttagtttgggcgatagagtgagatttaaaaaaaaaaattatatttttgattaaaaatttttaggaggtttttttagttttttgtgtttgttttttatatatagattaattaattaaaaagtgattggggaaaaaaaggaaatattatattatatttttttgaaatgtaagtatatagattttaatttatttttaagaataattgtatattttaaaaataggatacgtattgtatgagtaaatagcgtggttaatattaagtttatattggtaagtttttgagaattatttatattatgttgatagtagtattgttgtaggtagatagcggaagaataaataatagtgttttaagaagagtagtgattgagaggataggtaaagagggcgttttatcgtggaagttagagtaggaatatttttttagtagtgatatgtgtaaagttttagatttttacgataaagatagtttaatttattggaataaatagatttttaatgtggttggtaattgcgggggtagaagaatttaggtaaagtaggtataggaatgggggagatgagagttaagggataaacgtcgagaaagcgtttcgataagtatgtgtgtttatatatgtatatttttaataaagggtaatgtattgtgtaatagaa

SEQ ID NO: 159 - DNA, 2501 bp, Artificial Sequence
  chemically treated genomic DNA (Homo sapiens)
ttttgttatatagtgtattgttttttgttgggggtatgtatgtatgaatatatatgtttgtcggaacgttttttcggcgtttgttttttggtttttattttttttatttttgtgtttattttgtttgagtttttttattttcgtagttgttagttatattgggagtttgtttgttttaatgggttgagttgtttttgtcgtggagatttggaattttgtatatgttattattggggaggtgtttttgttttagtttttacgatgaggcgttttttttatttatttttttaattattattttttttgaagtattattatttattttttcgttgtttgtttgtagtagtattattgttaatatagtgtaaatggtttttaaaagtttattagtgtggatttggtgttagttacgttgtttatttatatagtacgtgttttgtttttaaaatatataattatttttaaaaataaattaaaatttgtatatttatattttaaaaagatatagtgtggtgttttttttttttttttagttattttttagttggttggtttgtgtgtgaaaaataaatataaaaaattaaaaggattttttggaaatttttagttaggagtgtgatttttttttttgagttttattttgtcgtttaggttggagtatagtggtattattttggtttagtgtaatttttattttttaggtttaagcgatttttttgttttagtttttcgatttgttgggattataggtacgtattattatatttggttaatttttgtatttttagtagagataggtttttattatgttggttaggttggttttgaatttttgattttagatgatttgtttgttttttaaagtgttgggatgataggtatgagttatagtattcggtcgagtgtgatttttaaaatattttttggtatatttttaaattaagaatattttttattttaattttttggtgagaaatataaaatttaatttttgatgtgtagagagtaaagggagttttaggatgtttttggttttaatgtcgtttgttttaatatggggaggttgtttaattttaatagcgttattgaaggaggatggatataaattgtatatatgtgaagcgtaagagaaaaattatcgttatagtttagttaattaagtttttttattttagtagttttttttattttttttttattttttttttttagttttattttgtcgagtaattattgatttttttttttttttttttttttttttttgagatggagtttcgtttttgttaggttggagtgtagtggtataattttagtttattgtaatttttgttttttaggtttaagggatttttttgttttagtttttcgcgtagttgggattgtaggtacgtgttattacgtttggtaaatttttgtatttttggtatagatagatagggttttattgtattagttaggatggtttcgattttttgattttatgattcgtttatttcggttttttaaagtgttaggattataggtatgagttattgtatttggtttatcgatttgttattatagattagtttgcgttttttatagttcgatgtaagtagaattatatagtatatatttttttggtttggtttttttattatttttagatttatttatattgttgtttatatttataatttttttttttttttttttttttttttttttttttttttgtttaaaattttagggggttgatatattaatttatttttttgttaggtttattttttatatttggtttttttttagtttttggttattaaaaataagggtgttttaaatatttatgtataagtttttgtatggatatatttttttttttggataaatatttaggagtgaaatggttggattatatttatgggatgggtatatttaattttttaaaaaatgttaaattgggtcgggtatgggggtttttttttgtaattttaatattttgggaggttaaggggggtaaattattagggtaggagttttaaattattttggttaatatggggaaattttttttttattaaaaaaataaaaattagttggttgggggggtatatatttgtaattttagttatttaggaggttgaggaaggagaattttttgaatttaggaggcggaagtggtagtgagttgagattgtattattgtattttagtttgggtaatagagtaagattttattttaaaaaagaagaaatgttaaattgttttttaaagtagttgtattattttatatttttattagtaatgtatgaaggttttagtttttttatatttttattaatagttggtatgtttagtttttatgtaattttagttattttgtgtatggagtggtgttttattatggtttttatttataattttttaatgattaatgatgtagagtatttttttatatgtttatttgttatttttttgtcgtttttgttgatttttgtttattttaaaaaatggtt

SEQ ID NO: 160 - DNA, 4001 bp, Artificial Sequence
  chemically treated genomic DNA (Homo sapiens)
aatatttattgtggtagtattattatagattttttttttgtttttttatttatattaatttaaaaaaatgttatttattaagggttttttaaattttgtattcggattaaaatatatgtttattgtttagaagaaataataataatagtatttaaaaataaaaaggaaaaagaatgtgaaggttagttttatttgattggaggtaatttatttttttttttttaatttatttggggttggaaggtaatattgaaaaatttttttagtttttttttgttatttttaaattatttttatttgtattattttttgagatttttatgttttatattttatttttttattagtttttgtaagtatttggttgtttttttatatgtgttaaaagacgtgaggaatttatttgttattttgagttttataagtttttgttagttttatatttatgaggtgttatttttattttgtattagttatttatatttaaagttatgttttattgttaggtataattgttttgttagattttatattgtaatttattttttgtttataatttattttttttttatttttttgtttttgagttttttacgattagtgggatattgagttttgtgatattttttttttagttatttttttttatttttttttttttgtttattttaaatataataaatattattttgtatattgagaggtatcgatttagttggtttgaagtgggattttggaatttagtttttaagtttttcgggtagtttggtgatgaattaggtgtgggaatttttgttatgatagaattatttttgattaatatttttagcgttttttttttattttttattttatttgggaaagttttagttttgtataagtttagaaatttacgtgttttatttttttgggttattgagattattggaaaaagttttacgattggtgttattgttaaataagtttttaattcgttagtttttttgttttatttgttattagtttagtggtttatatttttttcgtggattttaatttttagatttttttgtttaagtttttgttttttttttattttttttatatttagtaatttttttattttttttatgtttgagatatattagtgaagattggttaggttttgtttttatggatgttaagagttttgggaatggtgattttgtgagtgttagtttaaaatttttattttattcgttgttttttgtttttaaaataatttatagttgtatttattgttaagttcgttatgtagtttataagaggttatattatttgatgaaggtaaatttttatgttttgaatttttttttttttaataattttttaatgaattgattttttatatagttaattttttttatagtttataaaatattttattttaatataagtttttgttgtttgtgtttttatttttagtttttttagttttttttgtttagtttttgaagttttttaagttagtaatttgatttttgttattattgtttttattttttttttaagagttattaaatgttagatttagtggatattttttagttttttttttgattatattttttttttttttgaaagtttttatttttttggtttttttgatattatttttattggattattttttttatttttttttttttgttttgggtgtttttttttgtttattttttaaatttggtttttttaagaagttagtttttgggttatttttttgtaattttgtattttttttaggtaatttaatttattttcggttttgattattgtttatatggggtgtattattgtttttaaatatttggtttttattttaatttttgttttatatttcgggtttttatagttagttatttttgggatatttgtttgaaataattttggttatattttattattaatttttgttatatgtatttttttatgttgaaatggtattatttagtaattttttttattttttaattttttatatttgacgattatatttgaatagttatttttttttttaagttatatattagaagttttattgtttaaagaaattttaggtcgggtgtagtggtttacgtttgtaattttattattttgggaggttgaggtggcggattatttgaggttaggagtttgagagtagtttggttaacgtggtgaaatttcgtttttattaaaaaatataaaaattagacggacgagatggcgggcgtttgtaattttagttatttgggaggttgaggtaggagaattatttgaatttgggaggtaaaggttgtagtgagttgagattacgttattgtattttaatttgggcgataagaatgaagttttattttaaaaaaaataaaaaataaataaaaaaaaattttttttttttttttaaattatttatagattttaaggttttaaatagtttatagtaaaaaattagtgtgtatatttagttggttgaggtatttttttttaattatgaaaagttgagtaattatatgttattatagtgttgagttattagttatttttgtatattaataagtggagttttagtttaattttaaaaatcgttatgtagagtttatttatatttttaaataaatttatatgaatttatttaatatattaaaatgttatttaagtaattttataaattatggtttagtagtttatttttttttgagagtggttttggttaatttttatgttaatttttttttaagatttttgggttttatagttaagaggtttagttaattattaaattgtatcgttgttagtacgtaggtagttttatattatttgtattaataaaatttaatttttgatatatttttaataatattatttttttgttttggaagattaaagttatcggttagatagagttgaatgtaagtaatttagaagaagtgttatagttggtagcgtagagaaggaaaaaaaagtttttttaagtaatggtaaaattttatttttaagtagttaaatttttttaatttttattttttaaataatgggttaaaaataaatagtattaaaaggttaagtttatataatatatatgtatataattagtggtgttttttttttagataaaatattgaaataaatattagtttaaaaataaattatatagaagattttatatcgtaataataaatgtatagtttttttaaagggagaagagatttatatatttgataataaaataaattagtaatttagttttttaatttattttatgaggttggattttttttttagaaaagttaatttaaaatatttagaaatagttagtttatgtatagtaagtttttatgtttttttttaataaatagatttttaggagttagtatatatttaatattttttttttttaagaaaatagaagtttaggttaagtgttaagttttattattttgatattgtttttattttataatggaggaatttagaaaggattttaatagttttataaatataaataaagttttagttatattaaattaaaaaaaaaaattttttagggatattttagagtagtaaagtgatttttttatataaatagtttgaaagggtatttaagttttttatttaaattgtgatatataaaaaggttattattaagtaatttatatgttaagaaagttttagttaggaaggagttatagtatttattttgtttataatttttttggtatttttattgtttagagtataggttgaatattatgtttatttaagttttattagttaaaaaatgtgttatggtaaggtaaataaattagtttaaaaaatattaaattttattatttgtagaaatttaagttttataatagtttgttatagtagttatagataaattagttattttattataaaattaaatttttgtaaataagtttaaatttaatttttaagaattaaattgtattagttaagagtgtaggaattttgagaatttaataattagatttaaagta

SEQ ID NO: 161 - DNA, 4001 bp, Artificial Sequence
  chemically treated genomic DNA (Homo sapiens)
tattttgaatttagttgttagatttttaaaatttttatatttttgattagtgtaatttggtttttgaaaattaaatttaaatttgtttataaaggtttagttttgtaataaggtgattaatttatttatagttgttatagtaagttattataaaatttgaatttttataaatggtgaaatttaatgttttttaaattagtttatttgttttgttataatatattttttaattaataaggtttagatgaatatggtgtttaatttgtgttttaaatagtgggagtattaaagaaattataaataagataaatgttgtggtttttttttaattggggtttttttgatatgtaggttgtttggtaataatttttttgtatattataatttgggtgaaaaatttaagtatttttttaaattatttatatgaggaagttattttattattttaagatatttttaaggaatttttttttttaatttagtgtgattaaggttttatttatgtttgtgaaattgttaaggttttttttaaatttttttattgtgagataaggatagtgttaaagtgataaagtttaatatttgatttaaatttttatttttttaaggaagaagagtattaaatatatattgatttttagaaatttatttattaaaaaaagatatgaaaatttgttgtatataggttagttatttttaaatattttaaattagtttttttaaaaaaaaaatttagttttataaagtagattagaaaattagattgttagtttattttgttattagatatgtgaattttttttttttttgaagaaattatatatttattgttacggtatgaagttttttgtatagtttgtttttaaattaatatttgttttagtattttgtttgaaaagaaaatattattaattgtgtatatatgtattatataaatttaattttttaatattgtttatttttagtttattgtttaaaaaataaaagttaaaaaaatttaattgtttaaaagtaaagttttgttattgtttggagaaatttttttttttttttttgcgttgttagttgtaatattttttttggattgtttgtatttaattttgtttggtcgatggttttgattttttaaaatagaaaagtgatgttattagaggtgtgttaaaaattaagttttgttggtataagtaatataaagttatttacgtgttaataacgatatagtttaatgattaattgaattttttaattgtaaaatttaggagttttggaaaaaaattaatataaagattaattagggttatttttaaggaaagatggattgttgagttatagtttatggaattatttaagtggtattttaatatattaagtaaatttatgtaaatttatttgaaagtataagtaagttttatatggcgatttttagagttaaattagggttttatttgttaatgtgtaaaaataattggtggtttagtattatggtagtatatagttgtttaattttttatgattagaaagaagtgttttaattaattaaatatatatattagttttttgttatggattgtttagggttttaaaatttatagatgatttaaaaaaaaaaaaaaggtttttttttgtttgttttttgttttttttgagatggagttttatttttgtcgtttaggttggagtgtaatggcgtgattttagtttattatagtttttgttttttaggtttaagtgatttttttgttttagttttttaagtagttgggattatagacgttcgttatttcgttcgtttaatttttgtattttttagtagagacggggttttattacgttggttaggttgtttttaaatttttgattttaggtgattcgttattttagttttttaaagtggtgggattataggcgtgagttattgtattcggtttagaatttttttaaataataagatttttgatatgtagtttgaagagagaaatgattatttagatatgatcgttaggtatgggaagttggggaataggagaaattgttggatgatgttattttaatatgaaggaatgtatgtggtaaaagttggtagtagagtataattagagttgttttaaataggtattttaaagataattggttataaaaattcgaagtgtgagatagaagttggaataggagttagatatttgagagtagtaatatattttatgtggatagtaattaaaatcgagagtggattaaattatttagggagaatgtagggttatagaaaagtaatttaaggattaattttttgagaaaattaagtttaaggagtaggtagaaggagatatttaaaataaaaaggaagaaatagagaaagtaatttaataaaaatgatgttagggaagttaaaggaataaagatttttaagaaggaaggagatgtaattaggaaaaggattgaaaagtatttattggatttggtatttggtggtttttgagagaaaagtaagagtagtgatggtagaagttaaattgttggtttgaagagttttaaaagttaggtagagagggttgagggggttggaggtggaggtatagataataaaaatttgtattaggatgaaatattttatagattatgggagaggttgattatataggaaattaatttattagaaggttattgagggggagagaatttaaagtataaaaatttgtttttattaaatagtataattttttatgggttgtatagcgggtttaataatgagtatagttgtagattattttaaaggtaggaagtagcgaatgaaataggaattttaagttagtatttataaggttattatttttaagatttttaatatttatgaggatagagtttggttagtttttattggtatattttaagtatagaagaggtaaagaagttattgagtatggaaaaggtagagagaggataggggtttaaataggaaagtttaaaaattagagtttacgaagagaatgtggattattgaattagtggtaggtaaaataaaaaagttgacgggttggagatttgtttggtagtggtattagtcgtaggattttttttaatagttttagtggtttaagaaaataaaatacgtaagtttttggatttatgtagggttagggtttttttaggtgaggtaaaggataaagggaagacgttaaaaatattgattaagagtagttttattatagtaggggtttttatatttggtttattattagattattcgggaaatttaaaaattggattttagggttttattttagattaattgaatcggtattttttagtgtgtagaatagtatttgttgtatttgagatgagtagagaagggaagatggaagggaatgattgggaaaaaaatgttataaaatttaatattttattgatcgtgaggggtttaggagtaaggaagtaagagaaggataggttatgggtagagagtgggttgtagtataagatttaatagaataattgtgtttgatagtaagatatggttttgggtgtgagtggttggtatagagtaaaaataatattttatagatgtgaggttggtaaggatttgtaaagtttagggtgataggtaaattttttacgttttttgatatatgtagaggaataattagatatttataggagttagtaaggaagtaaggtatgaagtataagggttttaaaaaatgatataagtagaagtggtttggaaatagtaaaaaggagttaggaaaattttttaatattgttttttagttttaggtaaattagaaaagggagaatgaattgtttttaattaagtggaattggtttttatatttttttttttttttgtttttaagtgttgttattattgttttttttaaataatgggtatatattttagttcgagtataaagtttaaaagatttttaataaatagtatttttttaaattaatataagtgaaagagtaaagaaaagatttgtggtgatattgttatagtaaatgtt

SEQ ID NO: 162 - DNA, 3601 bp, Artificial Sequence
  chemically treated genomic DNA (Homo sapiens)
  unsure (3319): unknown base
ttttttatgtgaattatttgttaatatttttagtttagttttgttggattgtttgttttttttttaataattggaaggggttttttattttaggattatatttttgatttattatgaatattattttttagtttatgttttttaaaaatttgtataaatatattttagttatattgggtaatattttaaaagtagtttgtgattaggagtattaaatatttaattttattataaaattaattaattagaataatatgatataataatataggaataggtaattatagtagaatagattaggaatagatataagtatatttgggattttaaaatatgatgaagggatattttatttgaattgaggagaaagaatggattatttaattgttattttagatttttagttttatagattttgtttataagaaaatagtttttatattttaattaaaagtaaattgttaggatagggttagtttaatgttagggtattttgatgtggtggtttatgtttgtaattttagtattttgggatgtttaggttaggagattaagattattttgggtaatgtggtgaaattttgtttttattaaaaatataaaaattagttgggtgtggtggtgtgtgtttgtaattttagttatttgggaagttgaggtatgagaattatttgaatttaggaggtaggggttgtagtgaattaagattgtgttattgtattttagtttggtgatagagtaagattttgttttaaaataaataaataaataaaaatgttgggtttagtaaatatagtaagtaggttaaagatataggattttaaatatattttgtttttttaatttttaaggttttaaatatgtgaaattagtttttttggtttaatatatattttttatgtttgtaattttaatatatagtaataaaaggaatttgaatttttttaagattttttaaattttaatgttaatttagtaatatttttgaaataatatttttattttgtaataaaattttaattttaaggtatttatgtgttttgtatttattagtttttatgttaagtgttatattattattattgtagttaggtagatgagaaaatgaaatgttatagagattaattttttaatatttatttataatatggagttagtatttgaatataggtttttttgattataaaatttatttttttattatgtttagtttttttttttatttaaaaataatatataatgtatatataaatatatatgtatatgtaatatatgtttataaagtaatgtagaatataaagttataatattagttgtaatttaataatttatagaattttagtgaatagtttgatgtattttttttattgtttttttatattatatatatatttataaggatttatatttaaaattagttggtttttgtttattatatatatttgagaaaagtttattttgatatttttatagtattagaaatgggaagagatatatatggtgataattattatattttatgtagtagtggtttttaaatgttgatttataggttgatgttggttttaataaagtttttattgatttaaggtgaaataaggaaaatataatgataatatgaattttttttaatgtagggattattttgtattttaagtttttttttttattgtttttttgggggagggggtggatttaaatgtttatttttttaaaattttggaaagttgtgttttattgttgtaggtgaagatgataataatgatgatattagttttttgtaaaatataataatggtaattttgtgttgttttttgttttagtttttaaaaattttgttttattgttgtatgaaatttagaagttttgtaatgattgttgattattattttatatagttttttgttaattagtagtatatgtaattaattgtataaatatttgatttagttttgttgattttgggatatagtatattgattttttatttttattagtttattgagtatattttattttttttatttatagtatttggttatggattattatgttggtggggatttgtttattttatttagtaaatttgaagatagattgtttgaagatatggttagattttatttggttgagatggtgatagtaattgatttagtttattagttatattatgtatataggtaaaatagttttttattgtatttggttgtgagttattatgtaatatttagtaatagaggtttattttttgttagatttattaattatggttttggatatatttattgttaattaaaaaaaattattttgagatgattttggttgttttgttttgttgttgttattatttgttagtattatagaattgatgtgtttgtttatatatatatgtatatgtatagtatttaaaagttgttatttttagaataatagatattggagattaggaaaggtgggaggaggtgagggatgagaaattatttatgggtatagggtatattatttaagtgatgggtatattatattgtataatttataattatataatatgtttatgtaataaagttgtatttgtattttttaaatttatgaaaaaaaaagtttttggttggttatggttgtttatgtttgtaattttagtattttgggaggttaaggtgggtagattatgaggttaggagattgagattatggtgaaattttgtttttattaaaaatataaaaaaaaattagttgggtgtggtggtgggtatttgtagttttagttatttggagaggttgaggtaggagaatggtgtgaatttgggaggtggagtttgtagtgagttgagattttgttattgtattttagtttgggtgatagagtgagattttgtttttaaaaaaaaaaaaaaaaaaaaaagtttttatttttagttagtatttttagaaattattttttaaaaaattatttttgtttaaatgtatatatgaattttattttaaaaggagtatgtattggttagtttttttatagttgagttttatatatttaaattagttggaattttagattataagttataggtttatttgttaaataagttttgtattatatattttatgttttttaagaaaatatttttaaggattgtatgtgttaaaagagattttttttgtatgaaagtgataattttgatgtttatggagtaattataaattattaatattttatatttaaaaattttaaaaatattagtatgaatttggaaggatatataaaaaataagaaataaattaaggatatattggatgatttaaaagtatttttatattttanagaggaaagtaggaaatagtagaatgttgttggtgaattaattatttaaatgagagtatttttggatggtgtaaaatgtgagaaagagaaagatgttgaggagaagtatgtaaaggggatattgttagttagaaaataaattaaaattatttttttaaagagtgatttttaaatttggtatgtattttgaattttttaagggaaaggaaaagggggtggggtttggaaaaattttaaaaaattggtttgaaagttaaattttgttaaaaaaggtttaatttt

SEQ ID NO: 163 - DNA, 3601 bp, Artificial Sequence
  chemically treated genomic DNA (Homo sapiens)
  unsure (283): unknown base
aaaattaagttttttttggtaaagtttgatttttaaattaattttttggggtttttttaaattttatttttttttttttttttttagggaatttagaatgtatgttaagtttgaaaattattttttagaaaaatggttttagtttattttttaattggtagtattttttttatgtatttttttttagtattttttttttttttatattttgtattatttaaagatatttttatttgaatgattaatttattaataatgttttgttgttttttatttttttttntaaaatgtgagggtatttttaaattatttaatatatttttaatttattttttattttttgtgtgtttttttaaatttatgttggtatttttaaaatttttaaatataaagtattaatagtttataattattttatgaatattaaaattattatttttatataaaaaaaattttttttgatatatataatttttgaaagtatttttttgagaaatataaaatatataatataggatttatttagtaaatgaatttatgatttatggtttagaattttagttaatttaaatatgtaagatttaattataaggaaattgattaatgtatattttttttgagatggaatttatatgtatatttaaataagagtggttttttaagaagtgatttttagaaatgttgattggaagtgagaatttttttttttttttttttttttggagatagagttttgttttgttatttaggttggagtgtagtggtgggattttggtttattgtaagttttgttttttgggtttatgttatttttttgttttagtttttttgagtagttgggattataggtgtttgttattatgtttggttaatttttttttgtatttttagtagagatggagttttattgtggttttgattttttgattttgtaatttgtttgttttgattttttaaagtgttgggattataagtgtgagtaattgtgattggttgagaatttttttttttatagatttagggggtataagtgtagttttgttatatggatatattgtgtggttgtgagttatgtaatatagtgtatttattatttgaatagtgtattttgtatttataggtaattttttattttttatttttttttattttttttagtttttaatgtttattattttaggagtgataatttttagatattatatatgtatatgtatgtataagtaggtatattggttttgtaatgttgataaataataataataataaagtaaaataattaaaattattttaaaataattttttttggttgatgataaatgtatttaagattataattaataaatttggtaagaaataggtttttgttgttagatattatatggtaatttatagttaggtataatgaaggattgttttatttgtgtatataatgtagttgatgaattgagttaattgttattattattttagttaagtaaaatttagttatatttttaggtaatttatttttaaatttgttgagtagagtaagtaaatttttattaatataataatttataattaggtattgtgaatgaaaaaaataaaatgtatttagtaaattaataagggtgaaaaattaatatattgtattttaaggttaataggattgggttaaatatttatgtagttaattatatatgttgttaattaataagaaattgtgtaagatgatgattagtagttattataaaatttttaaattttatatagtagtaaaataaaatttttaaagattggggtagagaataatatagggttattattgttgtattttgtaaagagttaatattattattattattatttttatttataataatggaatatagttttttaagattttagaagaatgaatatttgaatttatttttttttttaaaaaaataatgaaagaaaaaatttggaatataggatagtttttatattgaaagaaatttatattattattatgttttttttattttattttggattagtaagaattttattagaattagtattagtttatagattagtatttagaaattattattatgtagaatatagtaattattattatatgtgtttttttttatttttaatattgtaaaaatattagaatgggttttttttaggtgtatataataaatagaagttaattaattttagatatggatttttatgggtatgtatgtggtgtaaagaaatgatgagaagagtatattaaattgtttattgagattttgtaggttgttagattatagttgatgttataattttatgttttatattgttttataagtatgtattatatatatatgtgtatttgtgtgtatattatatattatttttaagtgagggagaaaattagatatagtggaaaaatgggttttgtagttagagaaatttgtatttaaatattgattttatgttgtaagtggatgttgaaaaattaatttttgtgatattttatttttttatttatttaattataataatgataatgtagtatttagtatgaaggttagtgagtataagatatatgaatgttttgaaattaaggttttattatagaatgaagatattgttttagggatattattgagttgatattaagatttaaagagttttgaaaaaatttaaattttttttattattatatgttaaaattataaatataggaaatgtgtgttaaattaaagaaattaattttgtatatttaaagttttgaaaattagggaagtagaatatatttaaaattttgtgtttttggtttatttgttgtatttattaggtttaatgtttttgtttgtttgtttgttttgagatagagttttgttttgttgttaggttggagtgtagtggtgtaattttggtttattgtaatttttgttttttgggtttaagtgatttttatgttttagttttttaagtagttgggattataggtatgtattattatatttagttaatttttgtatttttagtagagatggggttttattatgttgtttaggatggttttgattttttgatttggatgttttaaagtgttgggattataggtgtgagttattatgttggggtattttaatgttgaattgattttattttgataatttatttttgattaaagtgtgaagattatttttttatagatagagtttataagattaaaagtttaaagtaatagttaaataatttattttttttttttaatttaaatgaaatgtttttttgttatattttaagattttaaatatatttatatttgtttttaatttattttgttatggttatttatttttatattattatattatattgttttgattggttaattttatagtaaaattgaatatttggtatttttaattataaattatttttaaaatattatttaatgtagttaaggtatatttatataagtttttaaaaaatatagattgagaggtaatatttataataggttaaggatataattttaaaataaagagttttttttaattgttaagagagggataaataatttaataaaattaggttaagaatattaatagataatttatataagagg

SEQ ID NO: 164 - DNA, 2295 bp, Artificial Sequence
  chemically treated genomic DNA (Homo sapiens)
gattttagattgtttttttagtaatgtgtggtttattaggaatatgtagagttgatgtttattttagagggttgttgagttaatttaagaaggtatttagtaggttgaggggttgttatattagttttgtgtagtagagggggtgtttattatggggattgaggagtaggtattggtaaatgtttgatttagaaagtagtttgggttttggtttttgtaatttattttttaggaatttaggttagttggtagtgtagggtttaggttttggaggtggtgaaataatttttttttttttgatttttgttttttgtatattttgtttgttagagttattttttatttaatttgtatttagtagggtgaggagttgttatgttagttttgtgtagagaaaattattgattaggggtttgttatgttttttgaaaggtattatgtaaagtttagaaaaagattgagaatgttaagatatgtttattatgtttaaaaagtttgtaaaggggtagtatttaggaatttaatatattttagtgtaatttgagttgtaattgatgtaggaataatatgttttggggaaatagaggtaggaatagtttttttggttggagaaggtttaggaagttttatggagggggtgatatttgggttggattaggaggtaagagtttattgagtatggaagagatagtaggtattttaggtaggaggatatgtgggtagaggtagagaggatgtttgttatggttggggagttttgttaagtgttaaatggttatattatgggtaggatagtttggtagggaaatgtagagtagtgggtgagttggatagaggtgggtagaagggttttgggtatggggtttaggttttgggatttgttttttagtggtggagaggtttgggtgggttataagttaggagtaatattttggaggtgttggaaagattattttgagggtggtgaggggttgattaagttaggaggtagggagatagtgtaggttattattagtttaggtaaagtatgataaaggtttaggagtgaggatagagggatggaggagaggggatatttttgaggtaggatatatgggttttgtataatttgttttgtttaataatttgtgattatttattttagtttttaggttttgttttttgaggatatttttgggtttttaaaagggtttaggatttagaagtgttttagttgatgtttgttgttatgggtagggtatatttgatttttattttattttgttttatttatttgggtttattagtattttatttgttttattatggttttggtgaggattttagttttgtgtggtttatttagtatgtttgttgtttttaggaagatttgggtttggtttgtaataggttttaggttttattttttttgggtagttagggtagttttaatggttttgttgagtaggttttaaagggagagggagaggttggggattgttatttgtagtgggaaaggttttggggagtgagtgagggaggagagatttgggaggttatttttttttatttggggataatgtttgtttttttgggtttttagttttttgttattatagttgttaataatagtgttttattagagtttgtagtggttgttagtttgaagtttgaagggtttggttaggttggttagttttttgaggttttggtattgagttttgtagttgttatattggttttatttttttttatggtttaattaaaattttattttatttttgggatttggtgttttttaatttattatttagaaatttgaggttaattggagtttgagatatggttttgttgttggttttttagattttaattgtttttattgttatataatgttagtttttggatttttagttattttagttttttttgttggttttttttagtgttaatttttggtttagttttttattaatggtgtttttaattgttttgatttagttttttagaatttattttttttttagtttaaggtttgttttattataatgggtatgtttgggaatgttttagttttggttgaggtagtttgtgtttggtttaagttaatttttgtatgtttggtttagttaaagatattatttagggatttttttagtgttagttattttttgtttatttatttattatggttaaagaaggatatagtaattgatgttttttgtttttgttatattagtagttggtagggtagagtaggggtagtaattttaattttgggttattaggtatataggtttatttattttgtttgta

SEQ ID NO: 165 - DNA, 2295 bp, Artificial Sequence
  chemically treated genomic DNA (Homo sapiens)
tgtagataaggtgagtgagtttgtgtgtttggtgatttggggttagggttgttgtttttgttttgttttgttagttgttgatatggtgggggtagggggtattagttgttgtgtttttttttggttatggtgggtaggtgggtagggggtggttgatattgagggagtttttgggtgatgtttttgattgggttaggtatataaaggttaatttgagttaaatataagttgttttagttagggttgagatatttttagatatgtttattgtggtggggtagattttggattggggaggaggtggattttggaaggttgagttagggtaattggagatattattgatggaaagttaggttaagaattggtattggaaagggttagtaggaggggttggggtggttgggggtttaggaattggtattgtgtggtgatgagggtagttggggtttgggaggttagtagtagagttgtgttttaggttttagttgattttaagtttttggatggtgggttaaggggtattaggttttaagaataaggtaaggttttgattagattatgagagaaagtggagttagtgtaatagttgtgggatttagtgttaaggttttggagagttgattaatttggttgggttttttaggttttagattggtagttattataggttttgatgggatgttgttgttggtagttatggtggtagggggttgagggtttagggagataggtattgtttttggatggaagagagtggttttttaggtttttttttttttgtttattttttagggttttttttgttgtaggtggtagtttttaatttttttttttttttttagagtttgtttaataaagttattgaggttgttttggttgtttggaaagagtgggatttgaagtttattgtagattgggtttagatttttttgaaggtggtagatatgttgagtgggttgtgtagggttgagatttttgttaagattatggtgggataggtgaggtgttggtgggtttgggtgggtggggtggggtggggtgggagttaggtgtgttttatttatggtagtagatattagttgaagtgtttttgggttttaagtttttttggggatttagagatgtttttaagggataaggtttaggagttgggatggatgattatagattattaggtgagatagattgtgtagagtttatgtgttttgttttggaaatgtttttttttttttatttttttgtttttgtttttaggtttttgttatgttttgtttggattggtggtggtttgtattgtttttttgttttttagtttggttagttttttgttgtttttagagtggtttttttaatatttttaggatgttatttttggtttatgatttatttagatttttttattattgagaggtaagttttaagatttgagttttatatttagggtttttttgtttatttttgtttagtttgtttattgttttgtatttttttgttaagttgttttgtttatagtgtagttatttggtatttagtaggattttttggttatggtaggtattttttttgtttttgtttatgtgtttttttgtttggaatgtttgttgttttttttgtgtttagtgaatttttattttttggtttagtttagatgttattttttttgtgagattttttgagttttttttagttgaaaggattatttttgtttttgtttttttagagtatgttgtttttgtattagttatagtttagattgtattggagtgtattgagtttttaggtattgtttttttataagttttttggatatagtaaatatgttttgatatttttggtttttttttgggttttgtatgatattttttaggaggtatagtaagtttttgattaatggttttttttgtatagagttggtatgatagttttttattttgttaaatgtaagttgagtgaggagtggttttagtaggtagagtgtgtgggggataggagttgagggagaaagggttattttattatttttaggatttgagttttatgttgttaattaatttgggtttttgaagggtaaattgtaggagttagaatttaggttgttttttggattaggtatttgttaatgtttgttttttggtttttatggtgagtattttttttgttgtatagagttggtatgatagttttttagtttgttaaatgtttttttagattggtttagtagttttttggggtgggtgttagttttgtgtgtttttggtgagttgtatgttgttgggaagatagtttaggatt

SEQ ID NO: 166 - DNA, 2657 bp, Artificial Sequence
  chemically treated genomic DNA (Homo sapiens)
ataattttggggtggggtgggaaggaagttaataaaaagtaagttgatttgtgttgtagatttttggggaggtttaggaatttgaagtattgggttttttttgggatattggtttttgggttagtttaaaatagggattagttaaaaatttgagaagtagatttttttttttagtataggagtaaattgtgttttttttttttattagaatattgtggatgtattttttagaggggttaaatgagaggttttgggtttgagtttattaatattaggtatagttgagggtggaggtaagattttatattaagaataggattaagtaaaattttttatgttgaatggtgattttttttttttattattttttttgtttaattgttagaatgttaataggtaggagagtagatatgttttttttgggtagttgattaggtataggaaagatttataaatttattggtttttttataatgaaatagttagttgttttgttattttatggtgaaggtttttagtagttaagttttattagtaaatagagattttagtttttagttttttgttattaaataaaaagttaaggattgttaaatgtatgtttataaatattagttttataagatattagggtgtgattttaatagttttgattttgtttaggagttggtgtttttgatttttttggggttaagttttttgttgtggtttttgtttgttgttttggtgaagtattgaagagagggaaaataattagtataaattttttttttttttttgagatagagttttgttttgttgtttagggtagaatgtagtggtataattttggtttattgtaatttttgttttttaggtttaagtaatttttttgttttagtttttgagtagttgggattgtagatatgtgttattatgttttattaatttttgtgtttttagtagagatgtggttttgttattttggttaggttggttttatattgttgattttaagtgatttatttaatttggttttttaaagtgttggtattataggtgtgagttattgtgttggttttaattagtataatttgtgatgttatggttttagatttaaatgttaggagatttttatagaaataaaatttaatgagtgtttgtatttgaattttgttatttaggatttattgatagttttttttttttttttattttttttttggggatggagtttttttttgttatttaggttggagtgtagtggtataatttttgtttattgtaagttttgttttttgggtttatattatttttttgttttggttttttaagtagttgggattataggtatttgttattatatttagttaattttttgtatttttagtagtgatgggattttattatgttagttaggatggttttgattttttgattttgtgatttatttgttttggttttttaaagtgttgggattataggtatgagttattgggtttggttaataatttttgaatattgatagtttattgaaatttgtaggtagatttaggggagattaaaggattgttttttagattgggaaagaaatagtttttttttttgtattttgatttgttatttttgattaaaaaatatgttatattaatttaaaatgtttttttttttttttttagtgataaatgttgtttattttttttataatggaataataattttattaatattagatgaagatagaattttatggaaaagaattagtaaaatgttaaatatgattataagttttgaagagaaaagaaaaattattggggatatttttgttaaggtatttttgtttttaatatttttaatatgtattatttttgatgtgaattttagtatttgtttttttttgttattatattaaataattaaattagttaattttaatttttttttttatgtggttgagagttttattgtatattgttattatattgattagtagaaattgttttatgtttttttgttgttgtttggttttttttttgtttttttgagatagagttttgttgtgttattaggttgggttggagtgtagttgtatgattttggtttgttgtaatttttgttttttgggtttaagtgatttttttgttttagttttttaagtagttgggattataggggtgtattattatgtttagttaatttttgtatttttagtagagatgggggttttattatgttggttaggttggtttggattttttgattttatgatttgtttgttttagttttttgaatttttgggattataggtgtgagttattatgtttagttaattgttttatgttttaataaatatgtttgtttatattgttaggttattattttaagaatagatgtttttaagagtagatgtatttagtttattatagattttaatttattgattattttaatggttaattttaagtttttgaatggaatgtttatatatttttgtttttgtttttttttttttttggaggtggagttttgtttttgttatttaggttggagtataatggagtgattttggtttatggtaatttttatttgttgggtttaagtgatttttttgttttagttttttgagtagttgggattataggtatgtattattatgtttagttaattttttttttttt

SEQ ID NO: 167 - DNA, 2657 bp, Artificial Sequence
  chemically treated genomic DNA (Homo sapiens)
aaaaagaaaaaaattagttgggtatggtggtgtatgtttgtaattttagttatttgggaggttgaggtaggagaattgtttgaatttagtaggtgaaagttgttgtgagttaagattgttttattgtattttagtttgagtgataagaataaaattttgtttttaaaaaaaaaaaaaaataaaaataaaggtatgtgaatattttatttaagagtttgaaattagttattgagataattaatgaattaaagtttatgataagttgaatatatttatttttaaagatatttatttttaaaataatagtttggtaatgtaggtaaatatgtttattaaaatataaaatagttggttgggtatagtggtttatatttgtaattttagaagtttgggaggttgaggtgggtggattatgaggttaggagatttggattaatttggttaatatggtgaaatttttgtttttattaaaagtataaaaattagttgggtatgatggtgtatttttgtagttttagttatttaggaggttgaggtaggagaattatttgaatttagaaggtagaggttgtagtgagttgagattgtgtaattgtattttagtttagtttggtgatatagtaagattttgttttaaaaaaataaaaaaaaaattaaataataataaaaaaatataaaatagtttttattggttaatataatgataatatataataaaatttttagttatataagaaaaaggattaaaattagttaatttggttatttgatatagtgataaggaaaaataaatattaagatttatattaaaaatagtatatgttgaggatattaaaaataaaggtattttaataaaagtatttttaatgattttttttttttttttaggatttgtggttatatttaatgttttgttaatttttttttgtggggttttatttttatttgatattggtagggttgttgttttattgtagaaagaatgagtagtatttattattggaggaaaggggagaagtgttttaaattggtataatatgttttttaattaaaaataataagttaaaatatagaaagaaaagttattttttttttagtttgaagagtagttttttgattttttttaaatttgtttataaattttaataaattattaatatttaagaattattggttgggtttggtggtttatgtttataattttagtattttgggaggttgagataggtggattatgaggttaggagattaagattattttggttaatatggtgaaattttattattattaaaaatataaaaaattagttgggtgtggtgatgggtgtttgtagttttagttatttgggaagttgaggtaggagaatggtgtgaatttgggaggtggagtttgtagtgagtagagattgtgttattgtattttagtttgggtgatagagagagattttatttttaaaaaaaaaataagaaaagaaaaagaattattaataaattttgagtaatagaatttagatataggtatttattaaattttgtttttgtgagaattttttggtatttagatttagggttatgatattataaattatgttgattagggttggtatggtggtttatatttgtaatattagtattttgggaggttaagttgggtggattatttgaggttagtagtgtgagattagtttggttaaaatggtaaaattatatttttattaaaaatataaaaattagtggggtgtagtggtatatgtttgtaattttagttatttagaggttgaggtaagagaattgtttaaatttgggaggtagaggttgtagtgagttgaggttgtgttattgtattttgttttgggtaatagaataagattttgttttaaaaaaaaaaaaaaaatttatgttgattgttttttttttttttagtgttttattagagtaataagtagaagttatagtaagaagtttagttttaaagaagttaaaagtattggtttttaaatggagttaaagttgttggaattatattttagtgttttgtaaaattaatatttatgaatatatatttaataatttttggttttttatttaatgataagaaattaaaaattaagatttttatttgttaataaaatttagttattggaggtttttattgtaagatgataaggtagttggttattttattgtggaaaagttagtgaatttgtaggttttttttgtatttggttaattatttagagaagatatatttatttttttgtttattggtattttggtagttaaatagaggaagtggtaggaagagggaattattatttagtatagagaattttatttaattttgtttttaatgtagagttttatttttatttttaattatgtttggtattagtaggtttaagtttagaattttttgtttagtttttttagagaatatatttatagtgttttgatggggaaggagagtatagtttgtttttgtgttaaggaaaaggatttgttttttagatttttaattaatttttgttttaggttaatttagagattaatgttttaaaaagaatttaatgttttaaatttttgagtttttttagaagtttatagtataaattagtttgttttttattggttttttttttattttattttaaggttgt

SEQ ID NO: 168 - DNA, 4001 bp, Artificial Sequence
  chemically treated genomic DNA (Homo sapiens)
ttataggtggaatggttagtattttgattatgttttggggtgtttgttttaattgtttgagataattggattttttaaaaatgatggtggagtttaatggtttttagttttgtaggtttttgttatatttaatattgagaggttttggtaggttaagttggtttggaaatgtttggttttgattttgtgttttgtttgaggttaagagattttagttttagttttagatttattatttatatgtgtgttttgaaattatttagtatttttgagatgtgttttatttattttataatattgtttgttttgtagttatgagatgttttatagtatagagtttgtttatatttagtgtttattaaaagttaagtgagtttagattggtttttaatattttgggttatttattaatgatatttgttaataatgttggttttttaggatttattttttgttttgtttgtttgtttgttttgttttgttttttgagatagttttgttttgttatttaggttgtagtgtagtggtgtgattttggtttattgtaatttttgtttttagggtttatgttatttttttgttttagttttttgagtatttgggattataggtgtttgttattatgtttggttaattttttatatttttagtagagatggggttttattgtgttagttagggtggttttgattttttgattttgtgatttgtttgttttggttttttagagtgttgggattataggtgtgagttattgtgtttagtttgggatttgtttttaagtattaataaattaatgagaagaaaatgattgatatttattgggtagtttttatatgttttttatatattttgttttttaattttatatatatgattttagtaatttttatgtattaattagtatataatttgattttaataaaagaaaatttagattaattatagtttaaataataaaatattaaattattttatgtaatgagaagtttgaatggtggttttaataataatatgaagttttaatgatttagattttttttttgtttttattttgttatttttaatttgttgattttttatttttagttttatatatttaaaatggttgttgtagttttaattattatatttgtatataaggaaagaaaagaatgagtagatggttattttttttttgaggaagggaattttttttagaagattttagtaggttttttttatgttttattggttggaattggattagaggtatatttttaggttagtaaatggagaaattatgagtattattttttttggggttatgtttatagggattataaattttttttatgaatataagtttgttgttatttttaagtagttatatatgttttagtattttttgttaataagttataggaaaagagaagagaaggagtaattgttatttaaattttagtgttgagtatttttattgagatttggagatgttgagaatttgttaaggtgtgagaggagttgtaaggaggttattgtggttgggtatggtgtatgaaagggagagaggaagaagtgtatagggagttggttggtttaggggttatgttaggattggggattttgtgttgtgtgatgggtaggttttggatagttgtatttagaagatgatttatatatgatgttagtttaaggattgttttgagatgtgtggatggtagaaggtgggtagggaggttgggtattagttaggaggttgtggtagtggtttttatggggagtatagggttggattaggatagtttatagaagatattttatttttttttttgtttaaggaagagatttagtggtagtagtgtaataagggtataggttaggaaatttaattttttagggatagtaagtatttagagatatgtggggatagttttagtattaaatggtttttgattaatgagtagagatggtaaatagtaaatgtgttattgtggtttttatgtgttatgaaggtgatgttgtaatttgagttttagagtttattttatttgtgaatttttattatttttagatgggtggattgaaagttattttttttgtttgtagttaggtagaggggagtgtaagagggtaaatgaaaattagaagtagggttgggtgtaatgttttatgtttgtaattttagtattttgggaggttgatgtgggtggattatttgaggttaggagtttgagattagtttggttaatatggtgaaattttgtttttattaaaaatataaaaattagttgggtgtggtggtatatgtttgtaattttagttatttaggaggttgaggtaggagaattgtttgagtttgggagatagaggttgtagtgagtagagattgtgttattgtattttagtttggttgatagagtgagattttgttttaaaaaaaaaaaaaaaaaaaaaaaaaaagaaaagaaaagaaaaagaaaaagaaaaggaaaaagaaaattagaagtaggagtagtttgaagaaatgatagggagttgattttttattgggagtttttttaaagtttatatatttgtttgtttggggtaatagtatttttttggatattttgtatttttttatgtttttttttttttatagtagtgaaagatttaggtaggatgattttagtttttttgtgagaattttatattttagtgtgaagttatagttttgtaattttttttttaagaattgttagagttggggaggttggttaagtttaggttggaggtggggatagagggaagaaagaaaaaaaaaaaagagagagaggtaggaaaagtttttttagaggaaaatgtagggtttgttttttattttgatgttagattttgttttaataaaattttttaagggttgtggaagaggtatatttggtgtttttgatgggttggttagtttgggtttagtttttttgagaggtggttggattttttgggttgtttggttgatgtttgtgttattgatgtttaggtatgaggtggtttttgttttggatgttggtagtagtgatagtagtagttgttagtattgttttggttatggtgagttttgtttggaggggtttagagggagatttagtttttttttttattgggttttgttatatgggggttggtgggtaggatgaaaagggttaggaaggtttggggttggaaggtggttatttatagggtaaggatagagtttagggtgaggagttagttgtttaggttggttgaagttggtagggtgaggaggatggtgtgatatttggggaaataaattgtataggtttagtttgttttttttttttatttgaaatagtgtagaaagaatggggtttttagtagaattgggagttaggggtttgggttttagatttgtttttgtttaatttggttgtgtggttttgggtgggttatttattttttaggagtagtgtaaagtgatgaagttgttaggtgatttttagagtttttgagtttgaaaattttaagattttaagtattggagatgttgtgaagatgggagatggaaaaagttaaaaaaaattggaaagaaaaatgttagtttttaataaaagttttttattgagtaaatagtgtttagggtgatgtttaattttaattgttgttatttttggtttgtatagttttttgtagtttgtagagtgtttatatttgggttttgtttatgaagtttgttgttttagggtgggggtgatgtgggtattttagagttttttttttttttatttgtattttagggtatattaaggggaagggataaaggtttgtatttttaaaagttaggggagttatatatgtgattgtgtagagttagtttgttagggttaggtatggtgaggaaaaggtagaggtaggtagtgtaaggagggtaggaggtgggtatttggtagtttttgagttttagattttatagtttagggtaggatttgtttttggtagaatagtttagagatggaggggtgatg

SEQ ID NO: 169 - DNA, 4001 bp, Artificial Sequence
  chemically treated genomic DNA (Homo sapiens)
tattatttttttgtttttaggttgttttgttaggagtaggttttgttttgggttgtggaatttggggtttagaagttgttaggtatttattttttgttttttttgtattgtttgtttttgttttttttttattatgtttggttttagtaggttggttttatatggttatatatgtgatttttttggtttttggaggtgtagatttttgttttttttttttggtgtattttggggtgtaggtggaagagagagagattttggggtgtttatattatttttattttggaatagtaggttttataggtaggatttaagtatggatattttgtagattgtagagggttgtgtagattggaggtgatagtagttggggttagatattattttgagtattgtttgtttaataaggagtttttgttgaaagttggtatttttttttttaattttttttggttttttttattttttatttttgtagtatttttaatgtttggagttttggagtttttaaatttagagattttagaagttatttaataattttgttgttttatgttgtttttggagggtgagtgatttatttgaggttatatagttaggttaggtgaagatgggtttggagtttgggtttttgatttttagttttgttgagggttttgttttttttgtattgttttaggtggggagagagggtaggttggatttgtgtagtttgtttttttaagtgttgtattgttttttttattttgttagttttagttaatttgggtagttgattttttattttgggttttgtttttgttttgtaagtggttattttttagttttaaatttttttggttttttttattttgtttattagtttttatgtagtaggatttagtagagaagggagttgggtttttttttgagtttttttaggtaggatttattgtggttaggatggtgttggtggttgttgttgttattgttgttagtgtttagggtaggaattattttatgtttggatgttagtggtataggtattgattgagtagtttagaggatttgattattttttgggggagttgggtttagattggttggtttattaggagtattagatatgttttttttgtagtttttggggggttttattaaagtaagatttgatgttagggtgaaggataaattttgtatttttttttgaaaaaattttttttgtttttttttttttttttttttttttttttttttttgtttttatttttagtttgagtttggttagtttttttagttttgatagtttttaaagggaaagttataaggttatgattttatattagggtgtgaaatttttatagaggagttggggttattttgtttaggttttttattattgtagggaggggggagtatgggagggtgtaggatgtttgaggagatattgttattttaggtaggtgggtgtgtgggttttgagagggtttttagtgggaaattaattttttgttatttttttaggttgtttttatttttggttttttttttttttttttttttttttttttttttttttttttttttttttttttttttttttttttgagatagagttttgttttgttggttaggttggagtgtagtggtgtgatttttgtttattgtaatttttgttttttaggtttaagtaatttttttgttttagttttttgaatagttgagattataggtatgtgttattatatttagttgatttttgtatttttagtagagatgaggttttattatgttggttaggttggttttaaatttttgattttaggtaatttgtttatattagttttttaaagtgttgggattataggtgtgaggtattgtgtttaattttatttttggtttttatttgtttttttgtatttttttttatttagttgtaagtgaaagaggtggtttttagtttatttatttagagatgataggaatttataaataaaatgagttttgaggtttaggttatagtattatttttatgatatgtgaaagttatggtaatgtatttgttgtttgttgtttttgtttattggttagaagttgtttggtgttggagttgtttttatgtgtttttggatgtttgttatttttggggggttgggttttttggtttgtatttttattgtattgttgttattgagttttttttttgggtaagaaaggagatgggatgttttttatgggttgttttagtttagttttgtgttttttatggggattgttgttatagttttttgattgatatttagtttttttgtttattttttattatttatatattttagagtaatttttgaattagtgttatgtatagattattttttggatataattgtttaaagtttgtttattatatagtatagagtttttagttttggtgtggtttttgggttagttagttttttgtatattttttttttttttttttttgtgtattatgtttaattataatggtttttttgtaattttttttatattttggtaagtttttagtatttttaggttttagtaggaatatttgatattgaggtttaaatgatagttatttttttttttttttttttttgtagtttattaataagggatgttgaagtatgtgtggttgtttggaggtagtagtaggtttgtgtttatggaagaggtttatgatttttatagatatgattttagaagagatggtgtttatgatttttttatttattgatttggggatgtgtttttgatttaattttggttaatgagatataagggaaatttgttagggttttttagaaaagatttttttttttaggaagagaatgattatttatttatttttttttttttttgtgtgtaaatgtgatggttggagttgtagtagttattttgggtatatgaggttgagaataaaaagttaataaattgaggatggtagagtggaagtaaaaaaaaggtttgagttgttgggattttatgttgttgttggagttattatttagattttttattatatgaaataatttaatattttattgtttaaattgtagttagtttgaatttttttttgttggagttaagttgtatattaattgatatatgaggattattaaaattatatatgtaaaattaaagggtagggtatgtggggggtatgtaaggattgtttaataaatgttagttattttttttttattaatttattgatgtttaaaaataaattttaggttgggtatggtggtttatatttgtaattttagtattttgggaggttgaggtgggtagattataaggttaggagattgagattattttggttaatatagtgaaattttgtttttattaaaaatataaaaaattagttaggtatggtggtgggtatttgtagttttaggtatttgggaggttgaggtaggagaatggtgtgaattttggaggtagaggttgtagtgagttgagattgtgttattgtattgtaatttgggtgatagagtaagattgttttaaaaaataaaataaaataagtaaataaataaagtaaaaaataaattttaggaggttagtattgttgataggtgttattaataaataatttaaggtgttaggggttaatttaggtttatttggtttttgatgaatattaagtatgaatgggttttgtgttgtagagtattttatgattataaggtagatagtgttatgaaataggtggaatatattttagagatgttagatggttttagagtatatgtatgagtagtagatttgaggttgaaattaaagttttttaattttagataaggtatagagttaggattagatatttttaagttagtttgatttgttaaagttttttaatgttaagtgtaataagagtttgtagagttggaagttattgaattttattattatttttaggaaatttaattgttttgagtaattgaagtaggtattttaaaatatgattaaagtgttgattattttatttgtgg

SEQ ID NO: 170 - DNA, 2501 bp, Artificial Sequence; identical to SEQ ID NO: 158
  chemically treated genomic DNA (Homo sapiens)

SEQ ID NO: 171 - DNA, 2501 bp, Artificial Sequence; identical to SEQ ID NO: 159
  chemically treated genomic DNA (Homo sapiens)

SEQ ID NO: 172 - DNA, 4001 bp, Artificial Sequence
  chemically treated genomic DNA (Homo sapiens)
aatatttattgtggtagtattattatagattttttttttgtttttttatttatattaatttaaaaaaatgttatttattaagggttttttaaattttgtatttggattaaaatatatgtttattgtttagaagaaataataataatagtatttaaaaataaaaaggaaaaagaatgtgaaggttagttttatttgattggaggtaatttatttttttttttttaatttatttggggttggaaggtaatattgaaaaatttttttagtttttttttgttatttttaaattatttttatttgtattattttttgagatttttatgttttatattttatttttttattagtttttgtaagtatttggttgtttttttatatgtgttaaaagatgtgaggaatttatttgttattttgagttttataagtttttgttagttttatatttatgaggtgttatttttattttgtattagttatttatatttaaagttatgttttattgttaggtataattgttttgttagattttatattgtaatttattttttgtttataatttattttttttttatttttttgtttttgagttttttatgattagtgggatattgagttttgtgatattttttttttagttatttttttttatttttttttttttgtttattttaaatataataaatattattttgtatattgagaggtattgatttagttggtttgaagtgggattttggaatttagtttttaagttttttgggtagtttggtgatgaattaggtgtgggaatttttgttatgatagaattatttttgattaatatttttagtgttttttttttattttttattttatttgggaaagttttagttttgtataagtttagaaatttatgtgttttatttttttgggttattgagattattggaaaaagttttatgattggtgttattgttaaataagtttttaatttgttagtttttttgttttatttgttattagtttagtggtttatattttttttgtggattttaatttttagatttttttgtttaagtttttgttttttttttattttttttatatttagtaatttttttattttttttatgtttgagatatattagtgaagattggttaggttttgtttttatggatgttaagagttttgggaatggtgattttgtgagtgttagtttaaaatttttattttatttgttgttttttgtttttaaaataatttatagttgtatttattgttaagtttgttatgtagtttataagaggttatattatttgatgaaggtaaatttttatgttttgaatttttttttttttaataattttttaatgaattgattttttatatagttaattttttttatagtttataaaatattttattttaatataagtttttgttgtttgtgtttttatttttagtttttttagttttttttgtttagtttttgaagttttttaagttagtaatttgatttttgttattattgtttttattttttttttaagagttattaaatgttagatttagtggatattttttagttttttttttgattatattttttttttttttgaaagtttttatttttttggtttttttgatattatttttattggattattttttttatttttttttttttgttttgggtgtttttttttgtttattttttaaatttggtttttttaagaagttagtttttgggttatttttttgtaattttgtattttttttaggtaatttaatttatttttggttttgattattgtttatatggggtgtattattgtttttaaatatttggtttttattttaatttttgttttatattttgggtttttatagttagttatttttgggatatttgtttgaaataattttggttatattttattattaatttttgttatatgtatttttttatgttgaaatggtattatttagtaattttttttattttttaattttttatatttgatgattatatttgaatagttatttttttttttaagttatatattagaagttttattgtttaaagaaattttaggttgggtgtagtggtttatgtttgtaattttattattttgggaggttgaggtggtggattatttgaggttaggagtttgagagtagtttggttaatgtggtgaaattttgtttttattaaaaaatataaaaattagatggatgagatggtgggtgtttgtaattttagttatttgggaggttgaggtaggagaattatttgaatttgggaggtaaaggttgtagtgagttgagattatgttattgtattttaatttgggtgataagaatgaagttttattttaaaaaaaataaaaaataaataaaaaaaaattttttttttttttttaaattatttatagattttaaggttttaaatagtttatagtaaaaaattagtgtgtatatttagttggttgaggtatttttttttaattatgaaaagttgagtaattatatgttattatagtgttgagttattagttatttttgtatattaataagtggagttttagtttaattttaaaaattgttatgtagagtttatttatatttttaaataaatttatatgaatttatttaatatattaaaatgttatttaagtaattttataaattatggtttagtagtttatttttttttgagagtggttttggttaatttttatgttaatttttttttaagatttttgggttttatagttaagaggtttagttaattattaaattgtattgttgttagtatgtaggtagttttatattatttgtattaataaaatttaatttttgatatatttttaataatattatttttttgttttggaagattaaagttattggttagatagagttgaatgtaagtaatttagaagaagtgttatagttggtagtgtagagaaggaaaaaaaagtttttttaagtaatggtaaaattttatttttaagtagttaaatttttttaatttttattttttaaataatgggttaaaaataaatagtattaaaaggttaagtttatataatatatatgtatataattagtggtgttttttttttagataaaatattgaaataaatattagtttaaaaataaattatatagaagattttatattgtaataataaatgtatagtttttttaaagggagaagagatttatatatttgataataaaataaattagtaatttagttttttaatttattttatgaggttggattttttttttagaaaagttaatttaaaatatttagaaatagttagtttatgtatagtaagtttttatgtttttttttaataaatagatttttaggagttagtatatatttaatattttttttttttaagaaaatagaagtttaggttaagtgttaagttttattattttgatattgtttttattttataatggaggaatttagaaaggattttaatagttttataaatataaataaagttttagttatattaaattaaaaaaaaaaattttttagggatattttagagtagtaaagtgatttttttatataaatagtttgaaagggtatttaagttttttatttaaattgtgatatataaaaaggttattattaagtaatttatatgttaagaaagttttagttaggaaggagttatagtatttattttgtttataatttttttggtatttttattgtttagagtataggttgaatattatgtttatttaagttttattagttaaaaaatgtgttatggtaaggtaaataaattagtttaaaaaatattaaattttattatttgtagaaatttaagttttataatagtttgttatagtagttatagataaattagttattttattataaaattaaatttttgtaaataagtttaaatttaatttttaagaattaaattgtattagttaagagtgtaggaattttgagaatttaataattagatttaaagta

SEQ ID NO: 173 - DNA, 4001 bp, Artificial Sequence
  chemically treated genomic DNA (Homo sapiens)
tattttgaatttagttgttagatttttaaaatttttatatttttgattagtgtaatttggtttttgaaaattaaatttaaatttgtttataaaggtttagttttgtaataaggtgattaatttatttatagttgttatagtaagttattataaaatttgaatttttataaatggtgaaatttaatgttttttaaattagtttatttgttttgttataatatattttttaattaataaggtttagatgaatatggtgtttaatttgtgttttaaatagtgggagtattaaagaaattataaataagataaatgttgtggtttttttttaattggggtttttttgatatgtaggttgtttggtaataatttttttgtatattataatttgggtgaaaaatttaagtatttttttaaattatttatatgaggaagttattttattattttaagatatttttaaggaatttttttttttaatttagtgtgattaaggttttatttatgtttgtgaaattgttaaggttttttttaaatttttttattgtgagataaggatagtgttaaagtgataaagtttaatatttgatttaaatttttatttttttaaggaagaagagtattaaatatatattgatttttagaaatttatttattaaaaaaagatatgaaaatttgttgtatataggttagttatttttaaatattttaaattagtttttttaaaaaaaaaatttagttttataaagtagattagaaaattagattgttagtttattttgttattagatatgtgaattttttttttttttgaagaaattatatatttattgttatggtatgaagttttttgtatagtttgtttttaaattaatatttgttttagtattttgtttgaaaagaaaatattattaattgtgtatatatgtattatataaatttaattttttaatattgtttatttttagtttattgtttaaaaaataaaagttaaaaaaatttaattgtttaaaagtaaagttttgttattgtttggagaaatttttttttttttttttgtgttgttagttgtaatattttttttggattgtttgtatttaattttgtttggttgatggttttgattttttaaaatagaaaagtgatgttattagaggtgtgttaaaaattaagttttgttggtataagtaatataaagttatttatgtgttaataatgatatagtttaatgattaattgaattttttaattgtaaaatttaggagttttggaaaaaaattaatataaagattaattagggttatttttaaggaaagatggattgttgagttatagtttatggaattatttaagtggtattttaatatattaagtaaatttatgtaaatttatttgaaagtataagtaagttttatatggtgatttttagagttaaattagggttttatttgttaatgtgtaaaaataattggtggtttagtattatggtagtatatagttgtttaattttttatgattagaaagaagtgttttaattaattaaatatatatattagttttttgttatggattgtttagggttttaaaatttatagatgatttaaaaaaaaaaaaaaggtttttttttgtttgttttttgttttttttgagatggagttttatttttgttgtttaggttggagtgtaatggtgtgattttagtttattatagtttttgttttttaggtttaagtgatttttttgttttagttttttaagtagttgggattatagatgtttgttattttgtttgtttaatttttgtattttttagtagagatggggttttattatgttggttaggttgtttttaaatttttgattttaggtgatttgttattttagttttttaaagtggtgggattataggtgtgagttattgtatttggtttagaatttttttaaataataagatttttgatatgtagtttgaagagagaaatgattatttagatatgattgttaggtatgggaagttggggaataggagaaattgttggatgatgttattttaatatgaaggaatgtatgtggtaaaagttggtagtagagtataattagagttgttttaaataggtattttaaagataattggttataaaaatttgaagtgtgagatagaagttggaataggagttagatatttgagagtagtaatatattttatgtggatagtaattaaaattgagagtggattaaattatttagggagaatgtagggttatagaaaagtaatttaaggattaattttttgagaaaattaagtttaaggagtaggtagaaggagatatttaaaataaaaaggaagaaatagagaaagtaatttaataaaaatgatgttagggaagttaaaggaataaagatttttaagaaggaaggagatgtaattaggaaaaggattgaaaagtatttattggatttggtatttggtggtttttgagagaaaagtaagagtagtgatggtagaagttaaattgttggtttgaagagttttaaaagttaggtagagagggttgagggggttggaggtggaggtatagataataaaaatttgtattaggatgaaatattttatagattatgggagaggttgattatataggaaattaatttattagaaggttattgagggggagagaatttaaagtataaaaatttgtttttattaaatagtataattttttatgggttgtatagtgggtttaataatgagtatagttgtagattattttaaaggtaggaagtagtgaatgaaataggaattttaagttagtatttataaggttattatttttaagatttttaatatttatgaggatagagtttggttagtttttattggtatattttaagtatagaagaggtaaagaagttattgagtatggaaaaggtagagagaggataggggtttaaataggaaagtttaaaaattagagtttatgaagagaatgtggattattgaattagtggtaggtaaaataaaaaagttgatgggttggagatttgtttggtagtggtattagttgtaggattttttttaatagttttagtggtttaagaaaataaaatatgtaagtttttggatttatgtagggttagggtttttttaggtgaggtaaaggataaagggaagatgttaaaaatattgattaagagtagttttattatagtaggggtttttatatttggtttattattagattatttgggaaatttaaaaattggattttagggttttattttagattaattgaattggtattttttagtgtgtagaatagtatttgttgtatttgagatgagtagagaagggaagatggaagggaatgattgggaaaaaaatgttataaaatttaatattttattgattgtgaggggtttaggagtaaggaagtaagagaaggataggttatgggtagagagtgggttgtagtataagatttaatagaataattgtgtttgatagtaagatatggttttgggtgtgagtggttggtatagagtaaaaataatattttatagatgtgaggttggtaaggatttgtaaagtttagggtgataggtaaattttttatgttttttgatatatgtagaggaataattagatatttataggagttagtaaggaagtaaggtatgaagtataagggttttaaaaaatgatataagtagaagtggtttggaaatagtaaaaaggagttaggaaaattttttaatattgttttttagttttaggtaaattagaaaagggagaatgaattgtttttaattaagtggaattggtttttatatttttttttttttttgtttttaagtgttgttattattgttttttttaaataatgggtatatattttagtttgagtataaagtttaaaagatttttaataaatagtatttttttaaattaatataagtgaaagagtaaagaaaagatttgtggtgatattgttatagtaaatgtt

SEQ ID NO: 174 - DNA, 2501 bp, Artificial Sequence
  chemically treated genomic DNA (Homo sapiens)
acggtgtttgatatagtaaattttaaaaaatgtattattattattatggtttagaggtaaagtgatttgtttaaggttatatagttggaaaatggtagagtcgggatggaaatttaggatttcgtgattgtaaagtagatgtttattggttagtgaattttagaattttaatttttttgtaaaggaagttaattatttttattttatagttttatttattagataagtatataaaatgtttggtatatagtaggttttttaaatatagtttattgggtcgggcgttatggtttatgttcgtaattttagtattttgggaggttaggtgggtagattatttgagttagaagttcgaaattagtttggttaacgtagtgaaattttatttttattaaaaatataaaaaatttagttaggcgtggtggcgtacgtttataatattagttattcgggaggttgaggtaggagaattgtttgaattcgggaggtagatgttgtagtgagtcgagattacgttattgtattttagtttgggtgatagagtgatattatattttttaaaaataaaataaaataaataaatataattttttgagttgttagtaggttttttttaaatagggttttgaagaaggtgaatatagattttgttcgatgtcggttggttaggaagaaaggagtgagggaggttgttggtgtgggaggtttgggagggaggtttggtataagtgtgataattggggttggagatttggttgtatggagtagggttggagaattgaaagggtttttatagattatttttttttatattttgttttaatttgtagttgaagaattttaagttgataaaggggaaggtatttattttaggttatattgtagtttagagtttaataatttggtttggtgattttaagttagaattatggttttttggtagggtttcgttttgttgtttaggttggagtgtagtgatataattatggtttattgtatttttgattttttttttgggtttaagtaatttttttatttcggttttttaaagtgttaagattataggaatgagttattatatttggttttgaattttgggttttggttttagtaattaaaattaattattattattcgttgcggatttataatttatagtgttttaaatattttatatgtttgattttatttaatttttatattaatttagggataaagagttttttatttttcgtttttttttttatagttgaggaaatattttaaagtggtaagatatttgttcgaggttttgaaggaagagagtaaagttatgtttgttgttttttagaggttgttattgttttttttattgttttgaagatttagtttgcggaagatagggggttgttttagtggaattttttagttttgtttagtagagtttatttttttcgtttttagatgaagtagggagaggaagttgagttaaagaaggttgttagggagggaaaaagaggatagagtttggagtgtggggaggggtttggggaggatatttgatttgggagggggtgttgtaaaaggttaaggatgggttagggggattattagttttagaaagaagttttagggagttttttattatttttttttggttgattattggaggtttttagattaagggatgggggatttttttagttttattttttttttttttttttatatagtttttataagttttgtagtttgtaaaattttattttttttttgagggtttgcggttttttgcgggtttggggttttgtttgatttggtagtggagattgcgggtagtggagagaggaggaggtggtgtaagtttttttttatgttggtgttgttatatatatatatatatatatatatatatatatatatatatatatattttgatttttgagttagtatttgtttgttaaggaggggtggggttataggagcgtttttttaaagtttttataatagtagttgtagttagatatttttgtttttattatgagtttttggtagtttttggttttggtgtttttggtgttgggttgttgttttgttgtttttagatagcgttagtttatttttgtgtttttttttggagatttgagaattaattttatcgataggtagttggtagaggtgggtaaatatttagtttagagttggggagggttgttcgtgagggtgttgagtgttttagagaggatgtagggttttagaggagatgttttaggggtgtgttggtggtgatgggcgtatttgaagaatagaggtgtttagggttaggtagtggggggttttgtggaggttttgagtagtgatggttagaaatgggtaatggggtttttttaggtgggaaatgggaaatggtttggggtgggggaggtattggagggttttggggtaagtataggttgggagtgaataggggtaaattttatgtagttgtggggtagaaatgggttagaggtatttaggggtga

SEQ ID NO: 175 - DNA, 2501 bp, Artificial Sequence
  chemically treated genomic DNA (Homo sapiens)
ttatttttggatgtttttagtttatttttattttatagttgtataaggtttgtttttgtttatttttagtttatgtttattttagaattttttaatgttttttttattttaaattattttttattttttatttaggaaagttttattgtttatttttggttattattgtttaaagtttttataagattttttattgtttaattttggatatttttgttttttagatacgtttattattattaatatatttttaaagtattttttttgaggttttgtattttttttgggatatttaatatttttacggatagttttttttaattttagattaggtgtttgtttatttttgttagttgtttgtcggtgagattggtttttaggtttttagggaagagtataagggtggattggcgttgtttgggggtagtaaagtagtagtttagtattaggagtattaggattaggggttgttagaggtttatggtgagggtagaggtgtttgattgtagttgttgttgtgggggttttaaggaggcgtttttgtgattttatttttttttgataggtaagtgttgatttaggggttagggtgtgtgtgtgtgtgtgtgtgtgtgtgtgtgtgtgtgtgtgtgtgtggtagtattagtatgagaaagggtttatattatttttttttttttttattgttcgtagtttttattgttaagttaggtaagattttagattcgtaggaaatcgtaggtttttaggggaggggtagggttttgtaaattgtagagtttgtgggaattgtatgaaagggagggagggggatgaagttggagggattttttattttttggtttgaaagtttttagtggttagttaagggaaagtgatggaagattttttgagatttttttttgaaattaatgatttttttggtttatttttggttttttgtaatatttttttttaggttagatattttttttaaatttttttttatattttaggttttgttttttttttttttttttgatagttttttttgatttagttttttttttttgttttatttgggggcggaaggaatgggttttgttaggtaaggttggggaattttattggggtaattttttgtttttcgtaggttgaatttttagggtagtaaaggggatagtagtagtttttagaaaatagtagatatggttttattttttttttttaggatttcgggtaaatgttttattattttgaagtgtttttttagttgtaaaaaaaaaaacggggggtggggggttttttgtttttaaattgatgtgaggattaaatgagattaaatatataaaatgtttagaatattgtaggttgtaagttcgtaacggatggtggtgattggttttaattattaaggttaagatttaagatttagggttaggtatggtggtttatttttgtaattttagtattttgggaggtcgaggtgggaggattgtttgagtttagaaagaaggttaaggatatagtgagttatgattatgttattgtattttagtttgggtaatagagcgagattttgttaaaagattatgattttaatttggaattattaaattaggttattgggttttaagttgtagtgtaatttggagtaaatgtttttttttttgttagtttaggattttttaattgtaaattggggtaggatatgggggaaaataatttataggagtttttttagttttttagttttgttttatgtagttaaatttttagttttaattattatatttatgttaagttttttttttaagttttttatattagtagttttttttatttttttttttttagttagtcggtatcgggtagggtttatatttattttttttaaagttttatttgggaaaaatttgttaataatttaaaaagttgtatttatttattttattttatttttggggggtgtagtattattttgttatttaggttggagtgtagtggcgtgatttcggtttattgtaatatttgtttttcgggtttaagtaatttttttgttttagtttttcgagtagttggtattataggcgtgcgttattacgtttggttaaattttttgtatttttagtagagatggggttttattacgttgattaggttggtttcgaatttttgatttaagtgatttgtttatttggttttttaaagtgttaggattacgggtatgagttatggcgttcggtttaataagttgtatttaaagggtttattatgtgttaggtattttatatgtttatttaataaatgagattgtgagatggagataattaattttttttatagaaaagttgaagttttaaagtttattaattaatgaatatttgttttgtagttacgaagttttggatttttatttcggttttgttattttttagttatgtgattttgggtaagttattttatttttgaattataataataataatgtattttttgagatttattgtgttaagtatcgt

SEQ ID NO: 176 - DNA, 2501 bp, Artificial Sequence
  chemically treated genomic DNA (Homo sapiens)
tgtataatatttaaaatatagaataatttaatatatatggaattatgttatatgtatttttagttttttttttatttaatagtttttagagttttgtttgtattagaatatatagatttatttttaatagatgtatagttttttatagtaagaatgtattataaattaatattttgtatattaaatatcggttggttttatatttttgtgttgtaaataatgttgtaaatgaatatttttatatataggttgggtatggttaattacgtttgttttgttagtatttttggaggtttagattgtaggattgtttaagtttaggagtttgaggttagtttgggtaatatagggagattattttaaaaaaaaaaatggtttttgattgattgaaatgtaaattgttttttaagttaaattttatatagagttagatgtgtgtttgtattcgtttgttttgttaatgtttattataaaatttttatatttttgatattttgacgtaaatattatgtgtttttttttttttgattatttaagaggtgaagttttttttgttaattgggtattttttttttgagttttattttattattgatataaaaatttttaatgggagtttggatattatatattaaaacgtgatagaaaaatttttttattttttaatttggtttatagtgtttgtttttttttaatagatttttatgattttttatagattgtagagggtgaagtttgggaatttttttttgttgttgttgttgtcgtttaagttggagggtagtggtatgattttagtttattgtaatttttattttttgggtttaagtaatttttttgttttaattttttgagtagttgggattataggtgtttattattatgtttggttaatttttgtatttttagtagagataggttttttttacgttggttaggtttgtttcgaatttttgattttaggtgatttatttattttggttttttaaagtgttgggattataggcgtgagttatcgtgtttagttttttttttttttaagtgaaagtaaggttattaggaaagtaaaggaataaaaaatggttattacgttagtagagtagtttagtttttaaagatatattatttgatattagtttttttataaaaattttatgataaatttatttgagtatttatttttgtttttaatgtttgttatttatttttaaaatatttaattgtatatatttgtggagtatattttgataaggttttatataagttgattttagggaaagagataattattgggagaaatatatttaaattattgttttaatttatattaatttgttttgttttttattaatagatttttggttgtttaaatttatattgtattggaaagtttagatattaaggtaagttgagtatttatgggtattagattgttttacgtgggttttagttttagatagttattttgtttttgtgatttttaatatattttgtgatttaatgaatgttatttgttgttaaaagttgtaatataggaattgttttattttatgaatatattgattatagttaagttttaggaattgttagtattataaacggtaataattttttttggaagattataaaatttggggattgtttgtaatatagtaaatgatttattttttttaaaaaagtaatttgaaaataattttgagaaattatttttaggatatagaagtaaaataaattattaaagagtaattttaaaaaagtataataaatttttataaatttaaaaaaaaaaaaaaataattggaattaattttggaaagttatttttaaggtttttagtttttatatgagttttttaatgatttttttttatagaaattttatttataatattatagttttatttttttattttaggttaagtaaaaagggaaagttttatatttagaagtagatggaagtaataattagggtatagtagaaagaaatttaatagataattttagaataagttattttattttgatgaataaaagtagtagttggtaattgaaaaaaagttatttgtttaataggatagtatatattttaaaagtaatgggtttttttttatatatgaaaataaaggtattggttatagagattatatattatttggttttaattttattgggataggaaatatattaaaggaagtgttgaagtttgtgttggtatgaaatttgtgatgaatgtgatatataggattattaatttaatttttgtttttgaaaataaattttggaagtattatttttagaaatatttttgtttttagtagagttttagttaggttttaggttacgaggtgttgtgttatagttttttagttttggttagttatttttattattttaattttcgagtaagtagttagggttaattattaagtagggattttttttatagtttttatttttttttgtggagttttttaatttagtttgggtgagtttaattagaat

SEQ ID NO: 177 - DNA, 2501 bp, Artificial Sequence
  chemically treated genomic DNA (Homo sapiens)
gttttaattgagtttatttaggttggattgaaaggttttatagagggaagtgagagttatgaagaagatttttatttggtagttaattttaattatttgttcgaagattgagatagtgaaagtaattgattagagttgaggaattgtggtatagtatttcgtggtttggagtttggttggagttttgttagggatagaagtgtttttggaagtgatgtttttaggatttgtttttagaaataagaattgagttgatggttttatgtgttatatttattataggttttatattaatataggttttagtattttttttggtgtgttttttgttttagtgaagttggaattaaataatgtgtagtttttataattaatatttttgtttttatgtgtaagaaaaggtttattatttttaaggtatgtgttgttttattgagtaaataatttttttttaattgttagttattgtttttatttattaaaataaaataatttgttttgaagttgtttattggatttttttttattgtattttgattattatttttatttatttttgaatgtgagattttttttttttgtttaatttggagtgaagaggtagaattgtggtattatggatgaggtttttatgagaaggagttattagagaatttatatgaaagttagaggttttagagatgattttttaaggttaattttagttgtttttttttttttttaagtttataaaagtttattatatttttttaaaattattttttagtaatttattttatttttgtgttttaagggtaattttttaggattgtttttaaattgtttttttaggggaaataggttatttgttatattataagtaatttttaaattttatggttttttaggaaaagttattatcgtttatgatattaatagtttttgagatttagttatgattagtatgtttatgaggtggagtagtttttgtgttgtagtttttaataatagatggtatttattaaattataaagtatgttaaaggttataaaagtaaaataattgtttgaggttaaggtttacgtgggatagtttaatatttatgagtatttaatttgttttgatgtttgagttttttagtgtaatgtgaatttgagtagttagaaatttattagtagaaagtaagatagattaatataggttaaaataatgatttaaatatgttttttttaataattatttttttttttggaattaatttgtatgaaattttgttaaaatgtattttataagtatgtataattaagtattttaaaaataaatggtaaatattaaaaataagagtgaatatttaagtagatttgttatgggatttttataagaagattggtattaggtaatgtatttttaaagattaggttgttttgttgacgtagtaattattttttatttttttatttttttaatagttttgtttttatttaagaaaaaaaaaggttaggtacggtggtttacgtttgtaattttagtattttgggaggttaaggtgagtagattatttgaggttaggagttcgagataagtttggttaacgtggagaaaatttgtttttattaaaagtataaaaattagttaggtatggtggtgggtatttgtaattttagttatttaggaggttgaggtaggagaattgtttgaatttaagaggtggaagttgtagtgagttgagattatgttattgttttttagtttgggcggtaataataataataaaaaaagatttttaggttttattttttatagtttatggaaagttatgggagtttattaaaaaaaaatagatattataaattaaattaaaagatgggaaaatttttttattacgttttaatatgtgatatttaaatttttattaagaatttttatattagtaataagataaaatttagaagaaaaatgtttaattaataagaagagttttattttttaaataattagaaaaagaaaagtatataatatttacgttaaagtattaaaaatgtaaaagttttataataggtattagtaaggtagacggatataggtatatatttaattttatgtaggatttaatttggaagataatttgtattttaattaattaaaaattatttttttttttgagatgatttttttgtgttgtttagattggttttaagtttttgggtttgagtagttttatagtttgagtttttaaaagtattggtaaaataggcgtgattgattatgtttagtttgtatataaggatatttatttgtagtattgtttgtaatataaaaatgtaaaattaatcggtgtttaatatgtaagatgttaatttatggtatatttttgttgtggaaagttatgtatttgttagaggtgggtttatatgttttgatataggtagaattttaagagttattaagtgaagaaaaggttgaaaatatatatggtataattttatatatgttaaattgttttatattttaaatgttatata

SEQ ID NO: 178 - DNA, 3303 bp, Artificial Sequence
  chemically treated genomic DNA (Homo sapiens)
ttattagggttatttagatatttcggttgttagggtttttggtggttaaatttgggaaaaggttatatgaagataattgtaagtatatatgatttttttgaattgttttttttttttgtaattgtgtttgtttttaaaaattgaagttttaaatagggtttatatgtgattatttttttatttattggagtttagtttgaaatgtgataatcggaattaaaagaattttgaatttggtgtttattttggttttggtgttgttgttttttaagatttttagtagggattaagaagttggggtgtatagtaggaatattaggaaattggtaggtttgattttttggtaaattgttagtaggattattaaatgttgaattgtattgtgaatgtatatcgaaatataagtaattatttttgtattaaaggtgtttttaattttgtatttgtgtaaaattatttttggaagtagtaattatttagttagaaaagtaaatgatgtttttattaattttttttggggaaaatattagtgttaaggatttaataatttgtaggtaaagtttaatttaatagtattttataaggagattttttattattagacggttgtttaatttttatataatttttatattaatataatttttggtttttttttattttttttataggttatagttgaggtgaaaagggttttggaatggttagtgagagttagaaatttagacgggaaaattgaaatttagagtagaaaggtaagttgtttaaaaataataacgttagttaatggtataattgttattagatttaagtatttagattttttggagttgtgagattttttattattattattttttaggtatcgggtagtgtttgtttttggatttaaatttatagtagcgaggaaattttattttagtaaagtgatttattgttattgttgttagtgtattttttttttgcgtttttgttttatatttattttttcgtcgttcgtttttaaatatttggattttttttagttttttataggttagttattattagaggatcgtgagttttcggtaagtgattaaatattgagttcgaatttcggtagtcgtattaacgtaattttgggagtttattttatttatttcgtagttttttttttattttatttttttttttgttagaaaagcggacgtcgtttttttagattttttttatgaaaatagtatttatttaaatagtgattatgaaaaatgttttttttagtttatagagaaaaagttttttttttttttaagagtttatgggcgtcgttatgttgttgtacggaaaaacgtttttagggcgagttgagcgtttagggtatttttcggcgtttaagttgtttataggtttttcgatttaattttaggggtcgtgttagttttcgtagagacggttatattggtttatagattttagtttttggggtgacgtagttgggcgcgattagtacgtagttttttagcgacgaggcggtcgtatggaagttattgcgcgcgtcgtgcgtaatgacgttagcgtcggcggagaattttaaattcgaacggttttggcgggtcgaggaaggatttggtgttttgatgatcgttgttttgtttagtagatatttgtacggtttatagaaattcggtttttgggtcgtgttaggaaattggaaaaaaggtgattgaatgatatcggattaattttgtttttgtagagttgttttggaggaagaaagtgatggcgttaatgatttaaatttagaggttttgaggcgatgttttggtgtttgtttgttgttgggagaagtttcgaggttaaaattgtgcgaggcgttggttttacgggatttattaaatttttagtggtaacgattttttaaggaggaaaggggagggtttgggggatattgatgaggagtggaggttcgggagaggaaacggggaagaattgaagggggcggaaagagatggataagagaggattcgttgggtgggttgcgtttgaatattagtgtagttttttatggtcgtgtaggattgcgtgtagaagtttttattttaaattatgagagttatattttaagtggagattaaacgtggatatataggtgtgagtggaaaagttgaatagatgaataagcgtatattgaagaggaaataggcggttaaaattaagaagagtttaattagtgtaaaagattaaggagtatttagagaagtaaaaggattgttatttttttgaaagttagggtaggatttgagaaggttgggtgtagagatgagataggattaaaagttttgttaattatgtgtattttaggagataaattttttagtagatgtgaagggagtgatttgttaatgtggtttgtaaatggaggtagtttatagattattttatggatcggatgatttatttttgttgaaggggagattgatgttaaaagggtagtaattgaggaaataatgggttaaggatagagtaggagagattgatattaggaaaatagaataattttattttttgaaattaaagaaaaggaaatattttgaggtgaataagagaatttgaggtaatttttttgtttttttattgaaataggtatagttaatagtagtaatgtggtttgggtaatagatagggttttagttattacggatatttttgtgaaggtaaaaatcgtaatttattcgtttttgtattttttgtattgtttagtatatttttttatatatatagtgggtagttaataaatgtttatgttgaatatttttaaatggaattaaatagatgttttttgtaaatgagaattttagtgtatatgaataaaaaagagatattttaggggaaagatgatgattttgaagaaataatgaaatttgattgtttttttgtttaaggataaatagttgtttaatgtattatttttgtttggaaagttttttttaaatattgaattcgtgaatgtaggttataagtatgaagcgtagtttagtttttagcggtggtgttggtcgtttttttatgtaggagttaagattttaggatgtaaataaataaggtttttatattttttaaacgtgagtattttttttgtggttttaatttgtatgttttattattttaggtaaagaaattataagaaatagttaatataaagatgtaatatgagtgatgttttggtgaattttgtttgtttttaggggtatttaattttggattaatgaaatttaaaagtgggtatgatattttgttaggtgttgtttgtgttatttgttttat

SEQ ID NO: 179 - DNA, 3303 bp, Artificial Sequence
  chemically treated genomic DNA (Homo sapiens)
gtgaaataaatgatataaataatatttagtagagtattatgtttatttttagattttattgatttaaaattaggtatttttgggaatagataagatttattaagatattatttatattatatttttatattaattattttttatgatttttttgtttaagatgataaagtatgtaaattagaattataagggaaatatttacgtttgaggggtatagaggttttgtttatttatattttgggattttaatttttgtatggagaggcggttagtattatcgttggaaattgaattgcgttttatgtttatgatttatatttacgaatttagtatttaaaaaaaattttttagatagagatggtatattaagtaattatttatttttaaatagaaagatagttaggttttattgtttttttaagattattattttttttttggggtattttttttttgtttatgtatattgaagtttttatttgtaaggaatatttatttaattttatttaaaaatatttaatataaatatttattaattgtttattatatatataggggagtgtgttaggtaatgtaggagatgtaaagacgagtaagttacggtttttgtttttataagggtattcgtggtagttaaagttttgtttgttatttagattatattattgttgttggttgtgtttattttaataggaagataaaaaaattattttaaatttttttatttattttaaaatgtttttttttttttggttttagagaatggaattattttgtttttttaatgttaattttttttgttttgtttttaatttattgtttttttaattattgtttttttggtattaattttttttttaataaggataaattattcggtttataaaatggtttataggttgtttttatttataaattatattaataggttattttttttatatttgttaaaaaatttgttttttaggatatatatgattgataaaatttttgattttgttttatttttgtatttagtttttttaggttttgttttggtttttaggaaggtgataatttttttatttttttgggtattttttagttttttatattgattagattttttttgattttggtcgtttattttttttttaatatgcgtttgtttatttatttaatttttttatttatatttgtgtgtttacgtttaatttttatttagaatgtagtttttatgatttaagatgaagatttttatacgtagttttatacggttataagaagttatattagtatttagacgtaatttatttaacgagtttttttttgtttattttttttcgttttttttaattttttttcgttttttttttcgagtttttattttttattagtgttttttaggttttttttttttttttttgggaaatcgttgttattagaaatttaatagatttcgtgaaattagcgtttcgtatagttttggtttcgaggttttttttaatagtaaataaatattaaaatatcgttttaggatttttaaatttaagttattggcgttattattttttttttttagaatagttttgtagaaataaagttaattcgatgttatttagttattttttttttagttttttgatacgatttagggatcgaatttttgtaaatcgtgtaagtatttgttagataggatagcggttattaaaatattaggttttttttcggttcgttaaagtcgttcgaatttgaaatttttcgtcggcgttgacgttattacgtacgacgcgcgtagtaatttttatgcgatcgtttcgtcgttggaaggttgcgtgttggtcgcgtttagttgcgttattttaggaattggggtttgtgggttagtgtggtcgtttttacgaagattggtacgatttttaaagttaggtcggaagatttgtgggtagtttgagcgtcgaggagtgttttgaacgtttaattcgttttggaaacgttttttcgtatagtaatatggcggcgtttatggatttttagaaaaggagaaagttttttttttgtggattggaaggggtattttttatgattattatttagatgggtgttgtttttatgaggagagtttgggaaggcggcgttcgtttttttgataagggaagaggtgaggtgggagaggggttgcggagtgggtggaatgggtttttaggattgcgttggtacggttgtcgaaattcgggtttagtatttgattatttgtcggaggtttacggttttttggtggtggttgatttgtgagaggttaggaagaatttaagtgtttgggggcgggcggcgagggagtggatgtgaagtagagacgtaggagaggggtgtattaataatagtaatagtagattattttgttaaaataggattttttcgttgttgtgagtttgaatttagaaataggtattgttcggtatttggagagtggtggtgatgaaagattttatagttttaggaagtttggatatttgggtttggtagtaattgtgttattaattagcgttgttatttttgggtagtttgtttttttgttttgagttttaattttttcgtttgaatttttagtttttattagttattttaggattttttttattttagttgtggtttatgaaggggatggggaggaattaaggattatattaatataaaaattatatgaaaattaggtaatcgtttgataataaaaagtttttttgtggaatattgttaggttaaattttatttatagattgttaaatttttagtattaatgttttttttagaaaagattaatggaaatattatttgtttttttgattagatagttgttgtttttaaaggtggttttatataaatataaaattaaaaatatttttagtatagaaataattgtttgtatttcggtatatatttatagtatagtttagtatttagtggttttgttagtaatttgttaggaagttaagtttgttaattttttgatatttttgttgtgtattttaattttttaatttttgttgaggattttgagaagtagtagtattaaaattaaagtaggtattaaatttaaggtttttttggtttcggttgttatattttaagttagattttaatagatggaaggatgattatatgtgagttttgtttaaaattttaatttttaagagtaagtataattgtaggaaaagaaaataatttagagggattatgtgtgtttatagttgtttttatgtggtttttttttaggtttaattattaaggattttgatagtcggggtgtttgaataattttggtga

SEQ ID NO: 180 - DNA, 4001 bp, Artificial Sequence
  chemically treated genomic DNA (Homo sapiens)
tgtttattttatttttttttttgtatgttttttaaatttaataattttaaatgagttgtttttaaatttgtttatttttttttttatttatttgagtttgttgttgaatttttttaataaaatttttaaattagttattgtattttttagtttaatatttttttttataatttttttgttgatgtttttattttgtttatatgtttttttgatttttttttgttttttgtttatgtttttttatagttttgcgagtatatttgatatttgtggtttttttttgttgttgttttgagatagatttttattttgttgtttaggttgaagcgtagttatgtgattttggtttattgtaatttttgttttttgggttttagtgatttttatgttttagttttttgagtagttgggattataggtgtgtagtattatgttttgttaatttttttgtatttttagtagagatggggttttattatgttggttaggttagtgttaatttttggttttaagtgatttgattgttttggttttttaaagtgttgggattataggtatgagttatcgtatttggttgatagttgttttaaagtttagtaagtttgatgtttgtgttttttttagaattgtttttggagatgtgttttgtttattttagtgggttatttttttttggttttttgtatgttttatgatttttttttgaaaattgggtatttaaaaaaaatatggttatttttttagtttttgtagattggtatgtaagattttattaatttgtaagtttatgaggtttttattaatttgagattagtttaggtttttttaggttttttttaggtatgttttttttttgtgaatgtgtgtgtgttttttgtttttattaaaggtgattttaaaggtttttattttttaaatagttttattgtagtttttttttagggttttagatattttattgtatttttttgtaattttttgtttttagaggtttatagggtagtaatttttgtgtagtttttatgtgttgtattgtttattattgttttttgtggtttttagtttgaaattaaaattatttgttgtttttagtttgatatttgagttggatattatagatattatttttgtaggtagtttatagataggttaggatgttgtaataagttttattttgttttttttgtttaagtgtttatatttttatgtttttttttatgttatattattttgtaaatattatgttatatggattttggatttatatgatagtttttttttagggttttagatattttattgtatggttggatttaatattatgttatatggattttggatatttattgtatttattatattgtggtattggatggaagttatgtttttgtggattatgttataattatttggaaaatgttatttttgttttagtaagaaattaatttggttaggtttagattataagttgttttgattttttgtgggtggtggttaaaattttagtatatttcgtaaagtttttgttatgttggtttgagtttgttttatttatgaattagatttatttaggtttatatatagaattagagttttttttttttggttttgggagtttttttttgtttttattttttagtttttagagggttttttttttttttaaagtgtttttgttttttttaatttttatttggttggttattttatggttatcgtagtattattttataataggggtgtgtttttgaggtagaagtattaggttggtgtaaaagtaattgtagttttgttttatttttaatattatgtttcggagttagattttagtaattgtgtttattttttataatttgggaaatttatttttgtgtagttgtttttttgtattttgatattttttaataatttatttgtttttgattaattttagtatgtttaagtagttttttttcgtattttttttagagattttagttgtaatttgtggaggaatgggtagtagttggtttgtgttgttattgtgggatgagaattttgtttagatttttatttttattttgatatttattgggagtttgattttggagaagttagtttaatttttatgtttcgggatgtttatttgaaaatgggtagtagtaatagatttattttatttttaatttttggtattgtttttggtggataaaatatgataatgggtattaagtattagtaattgtttaattgaaacgaatgtttatttttatttttatattttttataaaattgaatattttggattataattattggaataaaaaatttagaattaaaaagttaagagatttggtgagttagttaattttgattttaaaggaaaggttaaaaggaagattaagaaaagtaaaatattttatttttttttgtagtttttggaattatatttttagtttttgttaagtgatagttatgaaattaaaatagggtgttataaggataattaaggtagtttgtagggatgttttttataaagtattatattaaataagaatgggattttaataaataagaaaataattatttatatagagtattgttttttaatgaaatgatttagttttttttttatgtttttttattaaattgtgtaaaaaaatttaattaagatttttatttgggtttttatttttatttttgatttttatttgttttttagtaatattattttttttattttgtttttttgttatatggttgaaaaagaatatgtaatttattgaagattttaagttagtgatttgtaggttgttagtatttggtttaatttagttagttattgtttgtggacgttaaagtgttatagtggtatttaaagatatgattttagtttgtaatgttgtgagtgttttttaaagtaggattttaggtattatgttttagtgtttttggtaataacgatttatgttaaaagacgtaagattttttattattaaatatttgtgtgaatttttaagtttgttttataaaattttttatttattagagttgtagtgaaatattattattgtaattgatattttagtattataaaaggtataatgaagtttatttagttttagtattggaaattagaggtaatagtatatttttttttggatatgttttattttgttgtagtggttattatagttttgattttttggataagaagtttattatagtatttgtgtatttatttgatagttattttttttgaaggatattgtattttttagtattaatagcgtgtagtttttttttttttttttttttgattattttttttgaaatttttaaggtttggaaaaataaaattaataataaggttaagagttgatttaggttggacgtggatttatgtttgtaattttagtatttggggaggtcgaggcgggtagattagttgaggttaggagtttaagattagtttggttaatatggtgaaattttatttttattaaaaatataaaaattagttggttgtggtggtatatgtttgtgattttagttatttaggaggttgagttaagagaattgtttgaattcgggaggcggaggttgtagtgagttgagatcgtattattgtattttagtttgggtgataagtgagattttgttttaaaaagaaaaaaagagttaatttaataggagtgagattattttatgattttggtttttgttttttttatgtttatttaataaattttgttaaattttttttttttttttgagatatagttttattttgtcgtttaggttggagtgtagtggtgtaattttggtttattgtaatttttgtttttcgggtttaagtaattttttttgttttagtatttagagtagttgggattataggcgtttattattacgtttggttaatttttgtattttttaaatagagatgtggttttgttatgttggttaggttgtttttgaatttttgattttaggtgatttgttttttttggttttttaaa

SEQ ID NO: 181 - DNA, 4001 bp, Artificial Sequence
  chemically treated genomic DNA (Homo sapiens)
tttgggaggttaagaagggtagattatttgaggttaggagtttaagaatagtttggttaatatggtaaaattatatttttatttaaaaaatataaaaattagttaggcgtggtggtgggcgtttgtaattttagttattttggatgttgaggtagggagaattgtttgaattcgggaggtagaggttgtaatgagttaagattgtattattgtattttagtttgggcgatagagtgagattatgttttagaaaaaaaaaaaagatttaataggatttattaaatgaatatgggagaaataagaattagaattatagaataattttatttttattagattaattttttttttttttttgagatagagttttatttgttatttaggttggagtgtaatggtgcgattttagtttattgtaattttcgtttttcgggtttaagtaatttttttgatttagttttttgagtagttgggattataggtatgtattattataattagttaatttttgtatttttagtagagatggggttttattatgttggttaggttggttttgaatttttgattttaattgatttgttcgtttcggtttttttaagtgttgggattataggtatgagtttacgtttagtttaggttaatttttaattttattgttggttttgtttttttaggttttgagaattttaaaagaggtaattaggaaaagagagagagaaaaattatacgttgttaatgttgaagaatgtaatgttttttagggaagatggttattagatgaatgtataaatgttgtggtgaattttttatttagaaaattaaaattgtgatgattattatagtagagtaaagtatgtttaaggaaggatgtgttgttatttttgatttttagtattggaattaaataagttttattgtgttttttgtagtgttagaatattaattataatgatgatattttattatagttttgatgaataaaaagttttgtaaaataagtttaagaatttatataggtgtttggtagtagagagttttacgttttttgatatgaatcgttgttgttaggaatattggaatatggtgtttggggttttattttgaaaagtatttatagtattataggttgaagttatgtttttgaatgttattatagtattttgacgtttataaatagtggttgattgaattgggttaaatgttgatagtttatagattattgatttgaggtttttagtgggttgtatgtttttttttagttatgtagtaagggagtaaaatggaaggaatagtattattagaaaataaataagaattaagaataagaataagaatttaaataagaattttagttgggtttttttgtataatttaataaagaggtatgaagggaaaattgggttattttattggaaagtaatgttttgtatgagtaattgtttttttatttgttagagttttatttttgtttaatgtggtattttatgaaaggtatttttgtaagttgttttgattgtttttgtaatattttgttttgattttatagttattatttgataaggattgagggtgtaattttaagggttatagaaaaggatgggatattttgttttttttagttttttttttgattttttttttaaggttaaagttagttaatttattaaattttttaattttttagttttaaattttttattttagtaattgtaatttaagatgtttagttttatagaaaatataagaatagaaataagtattcgttttaattgagtagttattagtgtttaatgtttattattatattttatttattaaaaataatgttaaaaattaaaaatgaggtaggtttgttgttattatttatttttaagtaggtatttcgaggtatggagattaaattagtttttttagagttaaatttttagtaaatgttaaaatgaagataaaaatttaggtagagtttttattttataatggtagtataagttaattattgtttatttttttataaattataattaaaatttttagaagaaatacgaaaaagaattatttgagtatgttgaaattaattaaaagtaggtggattgttaaagggtgttaaaatatagagaagtaattgtataaggataagttttttagattatgagaaataaatataattgttggaatttaatttcggagtatggtattagaagtaaggtaaaattgtagttatttttgtattaatttaatatttttgttttagaggtatatttttattgtggggtggtgttgcggtgattatggagtggttagttaaatagaagttgaggaaaataaaaatattttgaaaaggaaaagggttttttgggggttaaagagtgaaagtaagaagagatttttagagttaagagaaagaagttttaattttgtgtatgaatttagataagtttgatttataagtgagatagatttaaattagtatagtaaaggttttgcgaagtgtattgggattttaattattatttatagaagattaagatagtttgtagtttgaatttaattagattgattttttgttaaaataaaaatggtattttttagatgattgtaatatgatttataaaaatataatttttatttaatgttataatatagtaaatatagtaaatatttaggatttatatgatataatattggatttaattatataatagaatatttaaggttttgagaagaagttgttatatggatttaggatttatatgatataatatttataaaatgatgtgatataaaaagaaatatggaaatgtgaatatttggatagaaggagtagagtgaaatttgttgtaatattttggtttgtttgtgggttgtttatagaaatggtgtttgtaatgtttaatttaggtattagattggagatagtaaatagttttgattttaggttggaagttatagaaggtagtggtgagtaatgtagtatatgaaaattatatagggattgttgttttgtggatttttgagggtaggagattatagaggaatataatagaatatttaaggttttaagaaaaagttgtagtgagattgtttaggaaatgaagatttttaaaattatttttgatggggatagggagtatatatatatttataggaaggaagtatgtttagaaaagatttgagaagatttggattaattttagattagtgaagattttatggatttataaattagtgaggttttatatgttagtttgtaaagattgggagagtggttatattttttttaaatatttaatttttaaaaaaagattataaggtatgtaaagaattagggaaagatggtttattgaaatgaataaaatatatttttagaaatagttttggaagaaatataggtattaggtttattagattttaaaataattgttagttaggtgcgatggtttatgtttataattttagtattttgggaggttaaggtagttagattatttgaggttaggagttgatattagtttggttaatatagtgaaattttatttttattaaaaatataaaaaaattagtagagtatggtgttgtatatttgtaattttagttatttagaaggttgaggtatgagaattattggaatttaggaggtagaggttgtagtgagttaagattatatgattgcgttttagtttgggtaatagagtgagagtttgttttaaaataataataaaaaaaaattataaatgttaaatatattcgtagaattgtagaaaaatatgaataaagaataaaggaaagttaagaaaatatatgaataaaatgagaatattaataaagaaattataaaaaaaaatattgagttgaaaagtataataattaatttgaaaattttattagaggagtttaatagtaaatttaaataagtagaagaaagaataagtaaatttgaaaatagtttatttgaaattattgaatttgagaagtatatagaagaaaaaataaagtgaata

SEQ ID NO: 182 - DNA, 5001 bp, Artificial Sequence
  chemically treated genomic DNA (Homo sapiens)
attattttattttatgtttaattattttttaaataaatataggttattaggatagagaaaggttttagaaaattagatgagaaaaataaagaaaaaatgattattatattgtttttttattggtaaaataaaatgaaattacgagtatattagtttatggatattttaattttgaaaataatttgaataaagtaattatttttaattttggaggtttttttttttttttattaaatttattaaattatggattaagttttgttttatattgtgaatattttaatatttattttaatgttataattataggtatttttttttatttaatattaagttatttaataaaatttttaaatgttaatgtatatttataatattataaaagataaaatagttttttttttattagttttttgttttttgttttttgaaaaaatataaaattaaggatatgtttttttatattttttatgtgaatataatttattaggttttttttgaagtaggagttaatattaaatatagtttgtaaatttaagtttttaattatgttttatgagtatattaaatttttttttcgtttttttattatttgaattttttattttttttttttttaattgaattggttaatatattaagaattatattaaataagaaattagagagtatttttattttgtttttgatattaacggaaaagttttaaagtgttttattaataagttagttattgtattaatttggtttgagattattgtataaattatgttaagaaaggtttaatttttttttaatagattagaaattgatgtgaaattttattaaaagtatttgttgagattattataattttttttttaatagtgaaaatttttaatatattttttaacgttgaataattatttttgagttgttggaataaattttagtggggttataaaattatttaagtatattgatgaatattgtttaataatattttttttaaatttttatattaatatttataaatataatttatttatagttttatttttttatattttttaaaagtttttgtattaatattatgttggttttataaaaatattgggtaattttttttttttttttgagttgaaaaaatttaaaattattggtttagtattttttgagggtatattgtgggtatagttttttttttttttttttttttttttttttgagatagagtatagttttgagtgggtatagttttttttttttttgtttttgttgtttaggttggagtataatggtgtagttttggtttattgtaattttttttttttgggtttaggtgatttttttgttttagtttttcgagtagttgggattataggtatgtattattatattaggttaattttgtatttttaggagagataggatttttttatgttggttaggttggttaggttttcgattttaggtgattcgtttattttggttttttaaggtgttgggattataggcgtgagttatcgtgtttagtcgcgggtatagtttttagataatatattttaattttttttttatatttattagtttgtttagtgttttttttttttttgaggttaattttggtagtatttattttattagataattttttattttatttaggtttttaaattgatgtgtagagagatgtgtaaagtatttttttatgatttttattttttttttgttttaatttttttttttatttgtatttttttatatttatgattttatttttttttttgattatattagtataatttattttattttttgtaaagaattattgatagatttttgttttgtttatcgtttttttattttattatttttaatattaatttttttttttatttttataatttttttttttttgtttttttgaaatttattttgttgttgttgttttggttgtggtttttttttttttttttttttgtgagataagtttttgttttattgttttggttggaatgtagaggaaagattatagtttatagttttaaatttttgggtttaagcgatttttttattttagtttttgaagtagttaggattataggtatgtattattatatttggttaattttttttttaagtatttgtagagatggggtattaaaattttgtgtttaggtgattttcgtgttttagttttttaaagtgatgggattataggtatgagttattatgtttagtttaaaatgaatgatatatttgaaaaaatatgtttagtataaaatttggatttaggattataaaatttaatagaatatatttttatttttgtggtataaatttatgaatttgtatttgggtttgattttaatttttattgtttaataaaatattaggattaatatatttattaaatatgtgggaatagttaatagttattaaatttttattttatgtttagtattgaggtagaaattttggtagtataaaagaagaggtaatatttttttatgtttttttatattttaaaatattttttagaaattggtaaattattagtttttataaagaatttttgagtattagttatttagatgatagaagtatttttagttcgtaaattttggttcgttatgatagatattgattattgtaataagaatttattttttgatatattttatttgtataataaatgatgataagattaatgtttataaaattatttatgattattattattgtgatatagtttgaggaataaatgatataggtaaagtaaatgaggttttaaaatattggtatttttttattataataaagtttttatagtttttattattgtagtatttatatggaatatttatgtatatatgtaattaaataatagaaatatatttaatatagtttaatttgtgattatttgaaaataatagtaaatgttaaattgtgttgaattgtgaaatgtatattattttatttatttatttgtttatttattttttatatattattttaaatgaattttgttgatttttttttatttcgtggttgaaaaataatagattagaaataaattagtgtaattaaagatgtaagttaatagttatagaaatagattgatgatttagaggagtgtttaacgtgtattataattatttagagggttttttataatatagattgttggattttatagttagaatttttgatttagtaagtttgagaattttgagaaatttgtatttttaataagttttgaggtgttgttaatgttgtaaagattattatgaattagatgttatttgattttgtttatttttttgatggtattaatattttaaaataaatgtttttaattttaatttgatatgaattaaaatgaatttattgaagttagggttgtttagttgtttatttttttttgttattagtttaatttttttatttaatttattttttaatttgttgttagaattattttttaaaaggtaaattttattatatttgttttttttttagtttttagtgtaaagttgaaattttttagttaaatattttattaatcgatttttattgatgttttaggatttagtttttgaagttttttttgtattttttttattttttagttggaattaaatgttttttttttggaaattatagtttttggattataagtgtattttatatagtattttatatttgtttatttatttgttttgagtttatttaaatttttagagtataggaatggaattttatttgtttttatagttttagtttttggtatattgtttagtatttagtagaagtttaataaatagttgttgaatgaattaattaaaattttttggtaatgtattaaggatgtaaatattttgtaaagtgtagttgtttagaaaaaaattttatattttatagataatgtggataaataaaattagaattgtaattttgaaattttgtttatttatattttttattatggtagatttttttaattttaagaatttgtgaaagtattcgtaatttttttaatttattgagttaaaaattttgtaaataattttatagaatataaggaatagtgtatttttaagatagttattttttatatataaaatgttatggaattaaagtgttaaataggtgaatgttatttgaggtgtttaaatatgagtaataggttaaagaagagattagagattagagatattgtggtattgaagtaataaggtggtgatagaagtgaatgttagattgtaatatttgatgttaaatatttataaattttaaaatttaattgaaatgtaaaagttaaatatatagggaatatatttttaaattttggtgtagattgattttttaaaaatatagtatgtatttattttgaataaaaaatattttcgattttgatttgtaaagggattttggaattttttttagaagagaaaatgagggtattataaattatataatattaaaaataagtgtaaattttttttgaaagtatattgagggttaaaattatttttaattgttataattaaatatagagggaattagggatttgaatagagaatttttgtattatatttgaaaatttttaataattagtagtattattagaattttatatttaaaaataatttttttgttagtgtgatagatttgttttttaggaattttgttagttttaggtgaatttattaataagtagaaagagaaatgatagatattttataattgattatatttaaaatttttttttagtattttgttagaatgaaataatttatttaaaatatatattgtatgtgttaatttatgaataggggaaaatataaaatagaattgtgttaaagttaaaaaatattatttaatatttttatagaaatgtagtttgaaattgaaggataaatttggtaaattatatttatttaatgaagttttaggatagatgtttttaatataattatatgtgtagaatgttaatttttaaatatttaaatatta

SEQ ID NO: 183 - DNA, 5001 bp, Artificial Sequence
  chemically treated genomic DNA (Homo sapiens)
taatatttggatatttaaaaattaatattttgtatatataattatattaggaatatttattttaaagttttattgaataaatgtaatttattaaatttgttttttaattttaaattatatttttgtagaaatattggataatattttttagttttgatataattttgttttatatttttttttgtttatgggttaatatatgtaatatgtattttaaataaattattttattttaataaaatgttgaaaggagattttaaatatagttaattatgaaatgtttgttatttttttttttatttattgatgaatttatttaaaattgataaaatttttgaaaggtaaatttgttatattgataaggaaattatttttaaatataagattttgatgatattgttagttgttgaaaatttttaggtatgatataaaaattttttatttaagtttttgattttttttatgtttagttatgatagttgaaagtaattttgatttttaatatatttttaaggagaatttgtatttatttttagtgttatgtgatttgtaatgtttttatttttttttttaggaagaattttaaagtttttttgtaagttaaagtcgaggatattttttatttagggtaggtatatattgtatttttaaaaaattaatttatattaaaatttaaaaatatgttttttgtgtatttaatttttatattttaattaagttttaaagtttatagatgtttggtattaggtgttatagtttgatatttatttttgttattattttattgttttaatattatagtatttttgatttttgattttttttttgatttattgtttatgtttaaatattttaaatagtatttatttatttgatattttaattttatgatattttatgtatagaaagtaattgttttaaagatatattattttttatgttttatggaattatttataaaatttttgatttagtagattggaagagttacgaatatttttataaatttttaaaattaaaagaatttgttataataaaaggtataagtagatagaattttaggattatagttttgattttgtttgtttatattgtttataaaatgtgaggtttttttttaggtagttatattttgtaaaatatttgtatttttaatatattattagaaagttttaattaatttatttaataattatttattgaatttttattgggtgttgagtaatgtattaagggttgggattataaagatagataggattttatttttatgttttaggaatttagataggtttaaaatagataagtaaataaatataaagtattgtgtgaaatgtatttgtagtttaaaggttgtgatttttaaaagaaaagtatttaattttagttggggaatggaagaggtatagagaagattttaagggttgaattttgaagtattaatgggaatcggttgatgaaatatttagttaagaaattttagttttatattaaaggttaaggagggggtaaatgtggtaagatttgttttttggaaaataattttaatagtaaattagagaatggattgaatgaaggaattggattgatagtaggaagaagtaagtagttaaatagttttgattttagtaagtttattttggtttatattaaattaaaattgagaatatttgttttaaaatgttggtattattaaggaaataagtaaagttaaatagtatttagtttatggtggtttttgtagtattagtagtattttagaatttgttagaaatataaattttttaggatttttagatttattaaattagaaattttggttatggggtttagtagtttatgttgtaaaaagttttttagatgattgtgatgtacgttaaatatttttttaaattattaatttgtttttatgattgttagtttgtatttttagttatattgatttatttttaatttattattttttagttacggaatggaagaaggttagtagggtttatttaaaatggtatgtgagaaataaataaataaataaataaataaaatagtatgtattttatagtttaatatagtttgatatttgttgttgtttttaaatagttataaattaaattatgttaaatgtatttttattatttgattgtatatgtatatgaatgttttatataaatattataatgataggagttgtaagggttttattgtaatgagaaaatattagtattttagggttttatttgttttgtttatgttatttattttttagattatgttataatagtaatgattataagtgattttgtagatattgattttattattatttattgtgtaagtaggatatgttagggaatgaatttttattgtagtaattagtgtttattataacgggttaagatttacggattgaaagtatttttgttatttaaataattgatatttaaagattttttataaaagttagtgatttattagtttttagagaatattttaaaatgtggaaagatatgagagaatgttatttttttttttgtgttattagaatttttattttagtgttggatatagagtagaaatttagtagttgttgattgtttttatatgtttaataaatatgttaattttaatattttattagataataaaagttgaaattaaatttaaatgtagatttataaatttatattatagaaataaaagtgtattttattaagttttgtaattttaaatttagattttatgttgaatatatttttttaaatatattatttattttagattgggtatagtggtttatgtttgtaattttattattttgggaggttagggtacgaggattatttgagtataggattttgatattttatttttataaatatttaagaaaaaaattagttagatgtggtggtgtatgtttgtagttttagttattttagaggttgagatgggaggatcgtttgagtttaggagtttgaggttgtgagttatgattttttttttgtattttagttaaggtaatagaataagaatttattttataaaaaaaaaaaaaaaaaaaaattataattaaaataataataataaagtaaattttaagaaggtagaaggaagaaagttataaaaatgaaagaagaaattgatgttaaaaatagtaaagtagaaggacggtaaataaagtaaaaatttgttagtaattttttataaaaaataaaataaattatattagtgtaattaagaaaaaggataaaattataaatatagaaaagtataaatgaaaagagaaattaaaatagagaagaaataaaaattatgaaagagtattttgtatatttttttatatattagtttggaaatttggataaaatggaggattgtttaataaagtaggtgttattaaaattgattttagaagaaagaaaaatattaaatagattaataggtatggggaaaaaattggaatatgttatttagaaattatattcgcggttgggtacggtggtttacgtttgtaattttagtattttgggaggttaaggtgggcggattatttgaggtcgggagtttgattagtttgattaatatggagaaattttgttttttttaaaaatataaaattagtttggtgtggtggtgtatgtttgtaattttagttattcgggaggttgaggtaggagaattatttgaatttaggagggagaggttgtagtgagttaagattgtattattgtattttagtttgggtaataagagtaaaaaaaaaggaaattatgtttatttaaaattatattttgttttaaaaagaagaagaagaagaaaaaaaagaaattatatttataatatatttttaaaaagtattaagttaataattttgaatttttttagtttagagaaagaagaaaaattatttaatatttttatgaagttagtataatattaatataaaaatttttaaaaagtataaaaaaatgaaattgtaagtaaattgtatttataaatattaatgtaaaaatttaaaaggaatattattaaatagtatttattagtatatttaaataattttatgattttattaagatttgttttagtaatttaaggatggttgtttaacgttaagaagtgtgttaaaagtttttattattagaagaaaaattatgataattttaatagatgtttttggtaaaattttatattaatttttgatttattaggaagagattaaattttttttgatatgatttatataatggttttaaattaagttagtatagtagttgatttgttagtgaaatattttggagttttttcgttaatgttaggaataagataaagatattttttaattttttatttaatgtagtttttaatgtgttagttaatttaattagaaaagaaagaaataaaagatttaaatagtggaaaagcgaaggaaaaatttaatgtgtttatgggatataattaggaatttgaatttgtagattgtgtttggtattaatttttgttttagaagaggtttgataaattatgtttatataaggaatatgagaaaatatatttttaattttgtatttttttaaggaataaagaatagagagttaatggaaaagaaattattttattttttataatattataaatgtatattggtatttaaaaattttattaaatagtttaatattaaatgggaaaaaatatttgtgattgtaatattgaaataagtattagagtgtttataatgtgaaatagaatttaatttatgatttggtgaatttagtaaaaaaaaaaaaaaatttttaaaattgagaataattgttttatttagattatttttaagattagggtgtttataaattaatgtattcgtgattttattttattttgttaatagaaaaataatataataattattttttttttgttttttttatttgattttttaaggtttttttttattttgatgatttatatttatttagaaagtggttaaatataaaatagaatgat

SEQ ID NO: 184 - DNA, 2501 bp, Artificial Sequence
  chemically treated genomic DNA (Homo sapiens)
atggtgtttgatatagtaaattttaaaaaatgtattattattattatggtttagaggtaaagtgatttgtttaaggttatatagttggaaaatggtagagttgggatggaaatttaggattttgtgattgtaaagtagatgtttattggttagtgaattttagaattttaatttttttgtaaaggaagttaattatttttattttatagttttatttattagataagtatataaaatgtttggtatatagtaggttttttaaatatagtttattgggttgggtgttatggtttatgtttgtaattttagtattttgggaggttaggtgggtagattatttgagttagaagtttgaaattagtttggttaatgtagtgaaattttatttttattaaaaatataaaaaatttagttaggtgtggtggtgtatgtttataatattagttatttgggaggttgaggtaggagaattgtttgaatttgggaggtagatgttgtagtgagttgagattatgttattgtattttagtttgggtgatagagtgatattatattttttaaaaataaaataaaataaataaatataattttttgagttgttagtaggttttttttaaatagggttttgaagaaggtgaatatagattttgtttgatgttggttggttaggaagaaaggagtgagggaggttgttggtgtgggaggtttgggagggaggtttggtataagtgtgataattggggttggagatttggttgtatggagtagggttggagaattgaaagggtttttatagattatttttttttatattttgttttaatttgtagttgaagaattttaagttgataaaggggaaggtatttattttaggttatattgtagtttagagtttaataatttggtttggtgattttaagttagaattatggttttttggtagggttttgttttgttgtttaggttggagtgtagtgatataattatggtttattgtatttttgattttttttttgggtttaagtaatttttttattttggttttttaaagtgttaagattataggaatgagttattatatttggttttgaattttgggttttggttttagtaattaaaattaattattattatttgttgtggatttataatttatagtgttttaaatattttatatgtttgattttatttaatttttatattaatttagggataaagagttttttattttttgtttttttttttatagttgaggaaatattttaaagtggtaagatatttgtttgaggttttgaaggaagagagtaaagttatgtttgttgttttttagaggttgttattgttttttttattgttttgaagatttagtttgtggaagatagggggttgttttagtggaattttttagttttgtttagtagagtttattttttttgtttttagatgaagtagggagaggaagttgagttaaagaaggttgttagggagggaaaaagaggatagagtttggagtgtggggaggggtttggggaggatatttgatttgggagggggtgttgtaaaaggttaaggatgggttagggggattattagttttagaaagaagttttagggagttttttattatttttttttggttgattattggaggtttttagattaagggatgggggatttttttagttttattttttttttttttttttatatagtttttataagttttgtagtttgtaaaattttattttttttttgagggtttgtggttttttgtgggtttggggttttgtttgatttggtagtggagattgtgggtagtggagagaggaggaggtggtgtaagtttttttttatgttggtgttgttatatatatatatatatatatatatatatatatatatatatatatattttgatttttgagttagtatttgtttgttaaggaggggtggggttataggagtgtttttttaaagtttttataatagtagttgtagttagatatttttgtttttattatgagtttttggtagtttttggttttggtgtttttggtgttgggttgttgttttgttgtttttagatagtgttagtttatttttgtgtttttttttggagatttgagaattaattttattgataggtagttggtagaggtgggtaaatatttagtttagagttggggagggttgtttgtgagggtgttgagtgttttagagaggatgtagggttttagaggagatgttttaggggtgtgttggtggtgatgggtgtatttgaagaatagaggtgtttagggttaggtagtggggggttttgtggaggttttgagtagtgatggttagaaatgggtaatggggtttttttaggtgggaaatgggaaatggtttggggtgggggaggtattggagggttttggggtaagtataggttgggagtgaataggggtaaattttatgtagttgtggggtagaaatgggttagaggtatttaggggtga

SEQ ID NO: 185 - DNA, 2501 bp, Artificial Sequence
  chemically treated genomic DNA (Homo sapiens)
ttatttttggatgtttttagtttatttttattttatagttgtataaggtttgtttttgtttatttttagtttatgtttattttagaattttttaatgttttttttattttaaattattttttattttttatttaggaaagttttattgtttatttttggttattattgtttaaagtttttataagattttttattgtttaattttggatatttttgttttttagatatgtttattattattaatatatttttaaagtattttttttgaggttttgtattttttttgggatatttaatatttttatggatagttttttttaattttagattaggtgtttgtttatttttgttagttgtttgttggtgagattggtttttaggtttttagggaagagtataagggtggattggtgttgtttgggggtagtaaagtagtagtttagtattaggagtattaggattaggggttgttagaggtttatggtgagggtagaggtgtttgattgtagttgttgttgtgggggttttaaggaggtgtttttgtgattttatttttttttgataggtaagtgttgatttaggggttagggtgtgtgtgtgtgtgtgtgtgtgtgtgtgtgtgtgtgtgtgtgtgtggtagtattagtatgagaaagggtttatattatttttttttttttttattgtttgtagtttttattgttaagttaggtaagattttagatttgtaggaaattgtaggtttttaggggaggggtagggttttgtaaattgtagagtttgtgggaattgtatgaaagggagggagggggatgaagttggagggattttttattttttggtttgaaagtttttagtggttagttaagggaaagtgatggaagattttttgagatttttttttgaaattaatgatttttttggtttatttttggttttttgtaatatttttttttaggttagatattttttttaaatttttttttatattttaggttttgttttttttttttttttttgatagttttttttgatttagttttttttttttgttttatttgggggtggaaggaatgggttttgttaggtaaggttggggaattttattggggtaattttttgttttttgtaggttgaatttttagggtagtaaaggggatagtagtagtttttagaaaatagtagatatggttttattttttttttttaggattttgggtaaatgttttattattttgaagtgtttttttagttgtaaaaaaaaaaatggggggtggggggttttttgtttttaaattgatgtgaggattaaatgagattaaatatataaaatgtttagaatattgtaggttgtaagtttgtaatggatggtggtgattggttttaattattaaggttaagatttaagatttagggttaggtatggtggtttatttttgtaattttagtattttgggaggttgaggtgggaggattgtttgagtttagaaagaaggttaaggatatagtgagttatgattatgttattgtattttagtttgggtaatagagtgagattttgttaaaagattatgattttaatttggaattattaaattaggttattgggttttaagttgtagtgtaatttggagtaaatgtttttttttttgttagtttaggattttttaattgtaaattggggtaggatatgggggaaaataatttataggagtttttttagttttttagttttgttttatgtagttaaatttttagttttaattattatatttatgttaagttttttttttaagttttttatattagtagttttttttatttttttttttttagttagttggtattgggtagggtttatatttattttttttaaagttttatttgggaaaaatttgttaataatttaaaaagttgtatttatttattttattttatttttggggggtgtagtattattttgttatttaggttggagtgtagtggtgtgattttggtttattgtaatatttgttttttgggtttaagtaatttttttgttttagttttttgagtagttggtattataggtgtgtgttattatgtttggttaaattttttgtatttttagtagagatggggttttattatgttgattaggttggttttgaatttttgatttaagtgatttgtttatttggttttttaaagtgttaggattatgggtatgagttatggtgtttggtttaataagttgtatttaaagggtttattatgtgttaggtattttatatgtttatttaataaatgagattgtgagatggagataattaattttttttatagaaaagttgaagttttaaagtttattaattaatgaatatttgttttgtagttatgaagttttggatttttattttggttttgttattttttagttatgtgattttgggtaagttattttatttttgaattataataataataatgtattttttgagatttattgtgttaagtattgt

SEQ ID NO: 186 - DNA, 2501 bp, Artificial Sequence
  chemically treated genomic DNA (Homo sapiens)
tgtataatatttaaaatatagaataatttaatatatatggaattatgttatatgtatttttagttttttttttatttaatagtttttagagttttgtttgtattagaatatatagatttatttttaatagatgtatagttttttatagtaagaatgtattataaattaatattttgtatattaaatattggttggttttatatttttgtgttgtaaataatgttgtaaatgaatatttttatatataggttgggtatggttaattatgtttgttttgttagtatttttggaggtttagattgtaggattgtttaagtttaggagtttgaggttagtttgggtaatatagggagattattttaaaaaaaaaaatggtttttgattgattgaaatgtaaattgttttttaagttaaattttatatagagttagatgtgtgtttgtatttgtttgttttgttaatgtttattataaaatttttatatttttgatattttgatgtaaatattatgtgtttttttttttttgattatttaagaggtgaagttttttttgttaattgggtattttttttttgagttttattttattattgatataaaaatttttaatgggagtttggatattatatattaaaatgtgatagaaaaatttttttattttttaatttggtttatagtgtttgtttttttttaatagatttttatgattttttatagattgtagagggtgaagtttgggaatttttttttgttgttgttgttgttgtttaagttggagggtagtggtatgattttagtttattgtaatttttattttttgggtttaagtaatttttttgttttaattttttgagtagttgggattataggtgtttattattatgtttggttaatttttgtatttttagtagagataggttttttttatgttggttaggtttgttttgaatttttgattttaggtgatttatttattttggttttttaaagtgttgggattataggtgtgagttattgtgtttagttttttttttttttaagtgaaagtaaggttattaggaaagtaaaggaataaaaaatggttattatgttagtagagtagtttagtttttaaagatatattatttgatattagtttttttataaaaattttatgataaatttatttgagtatttatttttgtttttaatgtttgttatttatttttaaaatatttaattgtatatatttgtggagtatattttgataaggttttatataagttgattttagggaaagagataattattgggagaaatatatttaaattattgttttaatttatattaatttgttttgttttttattaatagatttttggttgtttaaatttatattgtattggaaagtttagatattaaggtaagttgagtatttatgggtattagattgttttatgtgggttttagttttagatagttattttgtttttgtgatttttaatatattttgtgatttaatgaatgttatttgttgttaaaagttgtaatataggaattgttttattttatgaatatattgattatagttaagttttaggaattgttagtattataaatggtaataattttttttggaagattataaaatttggggattgtttgtaatatagtaaatgatttattttttttaaaaaagtaatttgaaaataattttgagaaattatttttaggatatagaagtaaaataaattattaaagagtaattttaaaaaagtataataaatttttataaatttaaaaaaaaaaaaaaataattggaattaattttggaaagttatttttaaggtttttagtttttatatgagttttttaatgatttttttttatagaaattttatttataatattatagttttatttttttattttaggttaagtaaaaagggaaagttttatatttagaagtagatggaagtaataattagggtatagtagaaagaaatttaatagataattttagaataagttattttattttgatgaataaaagtagtagttggtaattgaaaaaaagttatttgtttaataggatagtatatattttaaaagtaatgggtttttttttatatatgaaaataaaggtattggttatagagattatatattatttggttttaattttattgggataggaaatatattaaaggaagtgttgaagtttgtgttggtatgaaatttgtgatgaatgtgatatataggattattaatttaatttttgtttttgaaaataaattttggaagtattatttttagaaatatttttgtttttagtagagttttagttaggttttaggttatgaggtgttgtgttatagttttttagttttggttagttatttttattattttaatttttgagtaagtagttagggttaattattaagtagggattttttttatagtttttatttttttttgtggagttttttaatttagtttgggtgagtttaattagaat

SEQ ID NO: 187 - DNA, 2501 bp, Artificial Sequence
  chemically treated genomic DNA (Homo sapiens)
gttttaattgagtttatttaggttggattgaaaggttttatagagggaagtgagagttatgaagaagatttttatttggtagttaattttaattatttgtttgaagattgagatagtgaaagtaattgattagagttgaggaattgtggtatagtattttgtggtttggagtttggttggagttttgttagggatagaagtgtttttggaagtgatgtttttaggatttgtttttagaaataagaattgagttgatggttttatgtgttatatttattataggttttatattaatataggttttagtattttttttggtgtgttttttgttttagtgaagttggaattaaataatgtgtagtttttataattaatatttttgtttttatgtgtaagaaaaggtttattatttttaaggtatgtgttgttttattgagtaaataatttttttttaattgttagttattgtttttatttattaaaataaaataatttgttttgaagttgtttattggatttttttttattgtattttgattattatttttatttatttttgaatgtgagattttttttttttgtttaatttggagtgaagaggtagaattgtggtattatggatgaggtttttatgagaaggagttattagagaatttatatgaaagttagaggttttagagatgattttttaaggttaattttagttgtttttttttttttttaagtttataaaagtttattatatttttttaaaattattttttagtaatttattttatttttgtgttttaagggtaattttttaggattgtttttaaattgtttttttaggggaaataggttatttgttatattataagtaatttttaaattttatggttttttaggaaaagttattattgtttatgatattaatagtttttgagatttagttatgattagtatgtttatgaggtggagtagtttttgtgttgtagtttttaataatagatggtatttattaaattataaagtatgttaaaggttataaaagtaaaataattgtttgaggttaaggtttatgtgggatagtttaatatttatgagtatttaatttgttttgatgtttgagttttttagtgtaatgtgaatttgagtagttagaaatttattagtagaaagtaagatagattaatataggttaaaataatgatttaaatatgttttttttaataattatttttttttttggaattaatttgtatgaaattttgttaaaatgtattttataagtatgtataattaagtattttaaaaataaatggtaaatattaaaaataagagtgaatatttaagtagatttgttatgggatttttataagaagattggtattaggtaatgtatttttaaagattaggttgttttgttgatgtagtaattattttttatttttttatttttttaatagttttgtttttatttaagaaaaaaaaaggttaggtatggtggtttatgtttgtaattttagtattttgggaggttaaggtgagtagattatttgaggttaggagtttgagataagtttggttaatgtggagaaaatttgtttttattaaaagtataaaaattagttaggtatggtggtgggtatttgtaattttagttatttaggaggttgaggtaggagaattgtttgaatttaagaggtggaagttgtagtgagttgagattatgttattgttttttagtttgggtggtaataataataataaaaaaagatttttaggttttattttttatagtttatggaaagttatgggagtttattaaaaaaaaatagatattataaattaaattaaaagatgggaaaatttttttattatgttttaatatgtgatatttaaatttttattaagaatttttatattagtaataagataaaatttagaagaaaaatgtttaattaataagaagagttttattttttaaataattagaaaaagaaaagtatataatatttatgttaaagtattaaaaatgtaaaagttttataataggtattagtaaggtagatggatataggtatatatttaattttatgtaggatttaatttggaagataatttgtattttaattaattaaaaattatttttttttttgagatgatttttttgtgttgtttagattggttttaagtttttgggtttgagtagttttatagtttgagtttttaaaagtattggtaaaataggtgtgattgattatgtttagtttgtatataaggatatttatttgtagtattgtttgtaatataaaaatgtaaaattaattggtgtttaatatgtaagatgttaatttatggtatatttttgttgtggaaagttatgtatttgttagaggtgggtttatatgttttgatataggtagaattttaagagttattaagtgaagaaaaggttgaaaatatatatggtataattttatatatgttaaattgttttatattttaaatgttatata

SEQ ID NO: 188 - DNA, 3303 bp, Artificial Sequence
  chemically treated genomic DNA (Homo sapiens)
ttattagggttatttagatattttggttgttagggtttttggtggttaaatttgggaaaaggttatatgaagataattgtaagtatatatgatttttttgaattgttttttttttttgtaattgtgtttgtttttaaaaattgaagttttaaatagggtttatatgtgattatttttttatttattggagtttagtttgaaatgtgataattggaattaaaagaattttgaatttggtgtttattttggttttggtgttgttgttttttaagatttttagtagggattaagaagttggggtgtatagtaggaatattaggaaattggtaggtttgattttttggtaaattgttagtaggattattaaatgttgaattgtattgtgaatgtatattgaaatataagtaattatttttgtattaaaggtgtttttaattttgtatttgtgtaaaattatttttggaagtagtaattatttagttagaaaagtaaatgatgtttttattaattttttttggggaaaatattagtgttaaggatttaataatttgtaggtaaagtttaatttaatagtattttataaggagattttttattattagatggttgtttaatttttatataatttttatattaatataatttttggtttttttttattttttttataggttatagttgaggtgaaaagggttttggaatggttagtgagagttagaaatttagatgggaaaattgaaatttagagtagaaaggtaagttgtttaaaaataataatgttagttaatggtataattgttattagatttaagtatttagattttttggagttgtgagattttttattattattattttttaggtattgggtagtgtttgtttttggatttaaatttatagtagtgaggaaattttattttagtaaagtgatttattgttattgttgttagtgtattttttttttgtgtttttgttttatatttatttttttgttgtttgtttttaaatatttggattttttttagttttttataggttagttattattagaggattgtgagtttttggtaagtgattaaatattgagtttgaattttggtagttgtattaatgtaattttgggagtttattttatttattttgtagttttttttttattttatttttttttttgttagaaaagtggatgttgtttttttagattttttttatgaaaatagtatttatttaaatagtgattatgaaaaatgttttttttagtttatagagaaaaagttttttttttttttaagagtttatgggtgttgttatgttgttgtatggaaaaatgtttttagggtgagttgagtgtttagggtattttttggtgtttaagttgtttataggttttttgatttaattttaggggttgtgttagtttttgtagagatggttatattggtttatagattttagtttttggggtgatgtagttgggtgtgattagtatgtagttttttagtgatgaggtggttgtatggaagttattgtgtgtgttgtgtgtaatgatgttagtgttggtggagaattttaaatttgaatggttttggtgggttgaggaaggatttggtgttttgatgattgttgttttgtttagtagatatttgtatggtttatagaaatttggtttttgggttgtgttaggaaattggaaaaaaggtgattgaatgatattggattaattttgtttttgtagagttgttttggaggaagaaagtgatggtgttaatgatttaaatttagaggttttgaggtgatgttttggtgtttgtttgttgttgggagaagttttgaggttaaaattgtgtgaggtgttggttttatgggatttattaaatttttagtggtaatgattttttaaggaggaaaggggagggtttgggggatattgatgaggagtggaggtttgggagaggaaatggggaagaattgaagggggtggaaagagatggataagagaggatttgttgggtgggttgtgtttgaatattagtgtagttttttatggttgtgtaggattgtgtgtagaagtttttattttaaattatgagagttatattttaagtggagattaaatgtggatatataggtgtgagtggaaaagttgaatagatgaataagtgtatattgaagaggaaataggtggttaaaattaagaagagtttaattagtgtaaaagattaaggagtatttagagaagtaaaaggattgttatttttttgaaagttagggtaggatttgagaaggttgggtgtagagatgagataggattaaaagttttgttaattatgtgtattttaggagataaattttttagtagatgtgaagggagtgatttgttaatgtggtttgtaaatggaggtagtttatagattattttatggattggatgatttatttttgttgaaggggagattgatgttaaaagggtagtaattgaggaaataatgggttaaggatagagtaggagagattgatattaggaaaatagaataattttattttttgaaattaaagaaaaggaaatattttgaggtgaataagagaatttgaggtaatttttttgtttttttattgaaataggtatagttaatagtagtaatgtggtttgggtaatagatagggttttagttattatggatatttttgtgaaggtaaaaattgtaatttatttgtttttgtattttttgtattgtttagtatatttttttatatatatagtgggtagttaataaatgtttatgttgaatatttttaaatggaattaaatagatgttttttgtaaatgagaattttagtgtatatgaataaaaaagagatattttaggggaaagatgatgattttgaagaaataatgaaatttgattgtttttttgtttaaggataaatagttgtttaatgtattatttttgtttggaaagttttttttaaatattgaatttgtgaatgtaggttataagtatgaagtgtagtttagtttttagtggtggtgttggttgtttttttatgtaggagttaagattttaggatgtaaataaataaggtttttatattttttaaatgtgagtattttttttgtggttttaatttgtatgttttattattttaggtaaagaaattataagaaatagttaatataaagatgtaatatgagtgatgttttggtgaattttgtttgtttttaggggtatttaattttggattaatgaaatttaaaagtgggtatgatattttgttaggtgttgtttgtgttatttgttttat

SEQ ID NO: 189 - DNA, 3303 bp, Artificial Sequence
  chemically treated genomic DNA (Homo sapiens)
gtgaaataaatgatataaataatatttagtagagtattatgtttatttttagattttattgatttaaaattaggtatttttgggaatagataagatttattaagatattatttatattatatttttatattaattattttttatgatttttttgtttaagatgataaagtatgtaaattagaattataagggaaatatttatgtttgaggggtatagaggttttgtttatttatattttgggattttaatttttgtatggagaggtggttagtattattgttggaaattgaattgtgttttatgtttatgatttatatttatgaatttagtatttaaaaaaaattttttagatagagatggtatattaagtaattatttatttttaaatagaaagatagttaggttttattgtttttttaagattattattttttttttggggtattttttttttgtttatgtatattgaagtttttatttgtaaggaatatttatttaattttatttaaaaatatttaatataaatatttattaattgtttattatatatataggggagtgtgttaggtaatgtaggagatgtaaagatgagtaagttatggtttttgtttttataagggtatttgtggtagttaaagttttgtttgttatttagattatattattgttgttggttgtgtttattttaataggaagataaaaaaattattttaaatttttttatttattttaaaatgtttttttttttttggttttagagaatggaattattttgtttttttaatgttaattttttttgttttgtttttaatttattgtttttttaattattgtttttttggtattaattttttttttaataaggataaattatttggtttataaaatggtttataggttgtttttatttataaattatattaataggttattttttttatatttgttaaaaaatttgttttttaggatatatatgattgataaaatttttgattttgttttatttttgtatttagtttttttaggttttgttttggtttttaggaaggtgataatttttttatttttttgggtattttttagttttttatattgattagattttttttgattttggttgtttattttttttttaatatgtgtttgtttatttatttaatttttttatttatatttgtgtgtttatgtttaatttttatttagaatgtagtttttatgatttaagatgaagatttttatatgtagttttatatggttataagaagttatattagtatttagatgtaatttatttaatgagtttttttttgtttatttttttttgttttttttaatttttttttgtttttttttttgagtttttattttttattagtgttttttaggttttttttttttttttttgggaaattgttgttattagaaatttaatagattttgtgaaattagtgttttgtatagttttggttttgaggttttttttaatagtaaataaatattaaaatattgttttaggatttttaaatttaagttattggtgttattattttttttttttagaatagttttgtagaaataaagttaatttgatgttatttagttattttttttttagttttttgatatgatttagggattgaatttttgtaaattgtgtaagtatttgttagataggatagtggttattaaaatattaggtttttttttggtttgttaaagttgtttgaatttgaaattttttgttggtgttgatgttattatgtatgatgtgtgtagtaatttttatgtgattgttttgttgttggaaggttgtgtgttggttgtgtttagttgtgttattttaggaattggggtttgtgggttagtgtggttgtttttatgaagattggtatgatttttaaagttaggttggaagatttgtgggtagtttgagtgttgaggagtgttttgaatgtttaatttgttttggaaatgtttttttgtatagtaatatggtggtgtttatggatttttagaaaaggagaaagttttttttttgtggattggaaggggtattttttatgattattatttagatgggtgttgtttttatgaggagagtttgggaaggtggtgtttgtttttttgataagggaagaggtgaggtgggagaggggttgtggagtgggtggaatgggtttttaggattgtgttggtatggttgttgaaatttgggtttagtatttgattatttgttggaggtttatggttttttggtggtggttgatttgtgagaggttaggaagaatttaagtgtttgggggtgggtggtgagggagtggatgtgaagtagagatgtaggagaggggtgtattaataatagtaatagtagattattttgttaaaataggatttttttgttgttgtgagtttgaatttagaaataggtattgtttggtatttggagagtggtggtgatgaaagattttatagttttaggaagtttggatatttgggtttggtagtaattgtgttattaattagtgttgttatttttgggtagtttgtttttttgttttgagttttaatttttttgtttgaatttttagtttttattagttattttaggattttttttattttagttgtggtttatgaaggggatggggaggaattaaggattatattaatataaaaattatatgaaaattaggtaattgtttgataataaaaagtttttttgtggaatattgttaggttaaattttatttatagattgttaaatttttagtattaatgttttttttagaaaagattaatggaaatattatttgtttttttgattagatagttgttgtttttaaaggtggttttatataaatataaaattaaaaatatttttagtatagaaataattgtttgtattttggtatatatttatagtatagtttagtatttagtggttttgttagtaatttgttaggaagttaagtttgttaattttttgatatttttgttgtgtattttaattttttaatttttgttgaggattttgagaagtagtagtattaaaattaaagtaggtattaaatttaaggtttttttggttttggttgttatattttaagttagattttaatagatggaaggatgattatatgtgagttttgtttaaaattttaatttttaagagtaagtataattgtaggaaaagaaaataatttagagggattatgtgtgtttatagttgtttttatgtggtttttttttaggtttaattattaaggattttgatagttggggtgtttgaataattttggtga

SEQ ID NO: 190 - DNA, 4001 bp, Artificial Sequence
  chemically treated genomic DNA (Homo sapiens)
tgtttattttatttttttttttgtatgttttttaaatttaataattttaaatgagttgtttttaaatttgtttatttttttttttatttatttgagtttgttgttgaatttttttaataaaatttttaaattagttattgtattttttagtttaatatttttttttataatttttttgttgatgtttttattttgtttatatgtttttttgatttttttttgttttttgtttatgtttttttatagttttgtgagtatatttgatatttgtggtttttttttgttgttgttttgagatagatttttattttgttgtttaggttgaagtgtagttatgtgattttggtttattgtaatttttgttttttgggttttagtgatttttatgttttagttttttgagtagttgggattataggtgtgtagtattatgttttgttaatttttttgtatttttagtagagatggggttttattatgttggttaggttagtgttaatttttggttttaagtgatttgattgttttggttttttaaagtgttgggattataggtatgagttattgtatttggttgatagttgttttaaagtttagtaagtttgatgtttgtgttttttttagaattgtttttggagatgtgttttgtttattttagtgggttatttttttttggttttttgtatgttttatgatttttttttgaaaattgggtatttaaaaaaaatatggttatttttttagtttttgtagattggtatgtaagattttattaatttgtaagtttatgaggtttttattaatttgagattagtttaggtttttttaggttttttttaggtatgttttttttttgtgaatgtgtgtgtgttttttgtttttattaaaggtgattttaaaggtttttattttttaaatagttttattgtagtttttttttagggttttagatattttattgtatttttttgtaattttttgtttttagaggtttatagggtagtaatttttgtgtagtttttatgtgttgtattgtttattattgttttttgtggtttttagtttgaaattaaaattatttgttgtttttagtttgatatttgagttggatattatagatattatttttgtaggtagtttatagataggttaggatgttgtaataagttttattttgttttttttgtttaagtgtttatatttttatgtttttttttatgttatattattttgtaaatattatgttatatggattttggatttatatgatagtttttttttagggttttagatattttattgtatggttggatttaatattatgttatatggattttggatatttattgtatttattatattgtggtattggatggaagttatgtttttgtggattatgttataattatttggaaaatgttatttttgttttagtaagaaattaatttggttaggtttagattataagttgttttgattttttgtgggtggtggttaaaattttagtatattttgtaaagtttttgttatgttggtttgagtttgttttatttatgaattagatttatttaggtttatatatagaattagagttttttttttttggttttgggagtttttttttgtttttattttttagtttttagagggttttttttttttttaaagtgtttttgttttttttaatttttatttggttggttattttatggttattgtagtattattttataataggggtgtgtttttgaggtagaagtattaggttggtgtaaaagtaattgtagttttgttttatttttaatattatgttttggagttagattttagtaattgtgtttattttttataatttgggaaatttatttttgtgtagttgtttttttgtattttgatattttttaataatttatttgtttttgattaattttagtatgtttaagtagtttttttttgtattttttttagagattttagttgtaatttgtggaggaatgggtagtagttggtttgtgttgttattgtgggatgagaattttgtttagatttttatttttattttgatatttattgggagtttgattttggagaagttagtttaatttttatgttttgggatgtttatttgaaaatgggtagtagtaatagatttattttatttttaatttttggtattgtttttggtggataaaatatgataatgggtattaagtattagtaattgtttaattgaaatgaatgtttatttttatttttatattttttataaaattgaatattttggattataattattggaataaaaaatttagaattaaaaagttaagagatttggtgagttagttaattttgattttaaaggaaaggttaaaaggaagattaagaaaagtaaaatattttatttttttttgtagtttttggaattatatttttagtttttgttaagtgatagttatgaaattaaaatagggtgttataaggataattaaggtagtttgtagggatgttttttataaagtattatattaaataagaatgggattttaataaataagaaaataattatttatatagagtattgttttttaatgaaatgatttagttttttttttatgtttttttattaaattgtgtaaaaaaatttaattaagatttttatttgggtttttatttttatttttgatttttatttgttttttagtaatattattttttttattttgtttttttgttatatggttgaaaaagaatatgtaatttattgaagattttaagttagtgatttgtaggttgttagtatttggtttaatttagttagttattgtttgtggatgttaaagtgttatagtggtatttaaagatatgattttagtttgtaatgttgtgagtgttttttaaagtaggattttaggtattatgttttagtgtttttggtaataatgatttatgttaaaagatgtaagattttttattattaaatatttgtgtgaatttttaagtttgttttataaaattttttatttattagagttgtagtgaaatattattattgtaattgatattttagtattataaaaggtataatgaagtttatttagttttagtattggaaattagaggtaatagtatatttttttttggatatgttttattttgttgtagtggttattatagttttgattttttggataagaagtttattatagtatttgtgtatttatttgatagttattttttttgaaggatattgtattttttagtattaatagtgtgtagtttttttttttttttttttttgattattttttttgaaatttttaaggtttggaaaaataaaattaataataaggttaagagttgatttaggttggatgtggatttatgtttgtaattttagtatttggggaggttgaggtgggtagattagttgaggttaggagtttaagattagtttggttaatatggtgaaattttatttttattaaaaatataaaaattagttggttgtggtggtatatgtttgtgattttagttatttaggaggttgagttaagagaattgtttgaatttgggaggtggaggttgtagtgagttgagattgtattattgtattttagtttgggtgataagtgagattttgttttaaaaagaaaaaaagagttaatttaataggagtgagattattttatgattttggtttttgttttttttatgtttatttaataaattttgttaaattttttttttttttttgagatatagttttattttgttgtttaggttggagtgtagtggtgtaattttggtttattgtaatttttgttttttgggtttaagtaattttttttgttttagtatttagagtagttgggattataggtgtttattattatgtttggttaatttttgtattttttaaatagagatgtggttttgttatgttggttaggttgtttttgaatttttgattttaggtgatttgttttttttggttttttaaa

SEQ ID NO: 191 - DNA, 4001 bp, Artificial Sequence
  chemically treated genomic DNA (Homo sapiens)
tttgggaggttaagaagggtagattatttgaggttaggagtttaagaatagtttggttaatatggtaaaattatatttttatttaaaaaatataaaaattagttaggtgtggtggtgggtgtttgtaattttagttattttggatgttgaggtagggagaattgtttgaatttgggaggtagaggttgtaatgagttaagattgtattattgtattttagtttgggtgatagagtgagattatgttttagaaaaaaaaaaaagatttaataggatttattaaatgaatatgggagaaataagaattagaattatagaataattttatttttattagattaattttttttttttttttgagatagagttttatttgttatttaggttggagtgtaatggtgtgattttagtttattgtaatttttgttttttgggtttaagtaatttttttgatttagttttttgagtagttgggattataggtatgtattattataattagttaatttttgtatttttagtagagatggggttttattatgttggttaggttggttttgaatttttgattttaattgatttgtttgttttggtttttttaagtgttgggattataggtatgagtttatgtttagtttaggttaatttttaattttattgttggttttgtttttttaggttttgagaattttaaaagaggtaattaggaaaagagagagagaaaaattatatgttgttaatgttgaagaatgtaatgttttttagggaagatggttattagatgaatgtataaatgttgtggtgaattttttatttagaaaattaaaattgtgatgattattatagtagagtaaagtatgtttaaggaaggatgtgttgttatttttgatttttagtattggaattaaataagttttattgtgttttttgtagtgttagaatattaattataatgatgatattttattatagttttgatgaataaaaagttttgtaaaataagtttaagaatttatataggtgtttggtagtagagagttttatgttttttgatatgaattgttgttgttaggaatattggaatatggtgtttggggttttattttgaaaagtatttatagtattataggttgaagttatgtttttgaatgttattatagtattttgatgtttataaatagtggttgattgaattgggttaaatgttgatagtttatagattattgatttgaggtttttagtgggttgtatgtttttttttagttatgtagtaagggagtaaaatggaaggaatagtattattagaaaataaataagaattaagaataagaataagaatttaaataagaattttagttgggtttttttgtataatttaataaagaggtatgaagggaaaattgggttattttattggaaagtaatgttttgtatgagtaattgtttttttatttgttagagttttatttttgtttaatgtggtattttatgaaaggtatttttgtaagttgttttgattgtttttgtaatattttgttttgattttatagttattatttgataaggattgagggtgtaattttaagggttatagaaaaggatgggatattttgttttttttagttttttttttgattttttttttaaggttaaagttagttaatttattaaattttttaattttttagttttaaattttttattttagtaattgtaatttaagatgtttagttttatagaaaatataagaatagaaataagtatttgttttaattgagtagttattagtgtttaatgtttattattatattttatttattaaaaataatgttaaaaattaaaaatgaggtaggtttgttgttattatttatttttaagtaggtattttgaggtatggagattaaattagtttttttagagttaaatttttagtaaatgttaaaatgaagataaaaatttaggtagagtttttattttataatggtagtataagttaattattgtttatttttttataaattataattaaaatttttagaagaaatatgaaaaagaattatttgagtatgttgaaattaattaaaagtaggtggattgttaaagggtgttaaaatatagagaagtaattgtataaggataagttttttagattatgagaaataaatataattgttggaatttaattttggagtatggtattagaagtaaggtaaaattgtagttatttttgtattaatttaatatttttgttttagaggtatatttttattgtggggtggtgttgtggtgattatggagtggttagttaaatagaagttgaggaaaataaaaatattttgaaaaggaaaagggttttttgggggttaaagagtgaaagtaagaagagatttttagagttaagagaaagaagttttaattttgtgtatgaatttagataagtttgatttataagtgagatagatttaaattagtatagtaaaggttttgtgaagtgtattgggattttaattattatttatagaagattaagatagtttgtagtttgaatttaattagattgattttttgttaaaataaaaatggtattttttagatgattgtaatatgatttataaaaatataatttttatttaatgttataatatagtaaatatagtaaatatttaggatttatatgatataatattggatttaattatataatagaatatttaaggttttgagaagaagttgttatatggatttaggatttatatgatataatatttataaaatgatgtgatataaaaagaaatatggaaatgtgaatatttggatagaaggagtagagtgaaatttgttgtaatattttggtttgtttgtgggttgtttatagaaatggtgtttgtaatgtttaatttaggtattagattggagatagtaaatagttttgattttaggttggaagttatagaaggtagtggtgagtaatgtagtatatgaaaattatatagggattgttgttttgtggatttttgagggtaggagattatagaggaatataatagaatatttaaggttttaagaaaaagttgtagtgagattgtttaggaaatgaagatttttaaaattatttttgatggggatagggagtatatatatatttataggaaggaagtatgtttagaaaagatttgagaagatttggattaattttagattagtgaagattttatggatttataaattagtgaggttttatatgttagtttgtaaagattgggagagtggttatattttttttaaatatttaatttttaaaaaaagattataaggtatgtaaagaattagggaaagatggtttattgaaatgaataaaatatatttttagaaatagttttggaagaaatataggtattaggtttattagattttaaaataattgttagttaggtgtgatggtttatgtttataattttagtattttgggaggttaaggtagttagattatttgaggttaggagttgatattagtttggttaatatagtgaaattttatttttattaaaaatataaaaaaattagtagagtatggtgttgtatatttgtaattttagttatttagaaggttgaggtatgagaattattggaatttaggaggtagaggttgtagtgagttaagattatatgattgtgttttagtttgggtaatagagtgagagtttgttttaaaataataataaaaaaaaattataaatgttaaatatatttgtagaattgtagaaaaatatgaataaagaataaaggaaagttaagaaaatatatgaataaaatgagaatattaataaagaaattataaaaaaaaatattgagttgaaaagtataataattaatttgaaaattttattagaggagtttaatagtaaatttaaataagtagaagaaagaataagtaaatttgaaaatagtttatttgaaattattgaatttgagaagtatatagaagaaaaaataaagtgaata

SEQ ID NO: 192 - DNA, 5001 bp, Artificial Sequence
  chemically treated genomic DNA (Homo sapiens)
attattttattttatgtttaattattttttaaataaatataggttattaggatagagaaaggttttagaaaattagatgagaaaaataaagaaaaaatgattattatattgtttttttattggtaaaataaaatgaaattatgagtatattagtttatggatattttaattttgaaaataatttgaataaagtaattatttttaattttggaggtttttttttttttttattaaatttattaaattatggattaagttttgttttatattgtgaatattttaatatttattttaatgttataattataggtatttttttttatttaatattaagttatttaataaaatttttaaatgttaatgtatatttataatattataaaagataaaatagttttttttttattagttttttgttttttgttttttgaaaaaatataaaattaaggatatgtttttttatattttttatgtgaatataatttattaggttttttttgaagtaggagttaatattaaatatagtttgtaaatttaagtttttaattatgttttatgagtatattaaattttttttttgtttttttattatttgaattttttattttttttttttttaattgaattggttaatatattaagaattatattaaataagaaattagagagtatttttattttgtttttgatattaatggaaaagttttaaagtgttttattaataagttagttattgtattaatttggtttgagattattgtataaattatgttaagaaaggtttaatttttttttaatagattagaaattgatgtgaaattttattaaaagtatttgttgagattattataattttttttttaatagtgaaaatttttaatatattttttaatgttgaataattatttttgagttgttggaataaattttagtggggttataaaattatttaagtatattgatgaatattgtttaataatattttttttaaatttttatattaatatttataaatataatttatttatagttttatttttttatattttttaaaagtttttgtattaatattatgttggttttataaaaatattgggtaattttttttttttttttgagttgaaaaaatttaaaattattggtttagtattttttgagggtatattgtgggtatagttttttttttttttttttttttttttttttgagatagagtatagttttgagtgggtatagttttttttttttttgtttttgttgtttaggttggagtataatggtgtagttttggtttattgtaattttttttttttgggtttaggtgatttttttgttttagttttttgagtagttgggattataggtatgtattattatattaggttaattttgtatttttaggagagataggatttttttatgttggttaggttggttaggtttttgattttaggtgatttgtttattttggttttttaaggtgttgggattataggtgtgagttattgtgtttagttgtgggtatagtttttagataatatattttaattttttttttatatttattagtttgtttagtgttttttttttttttgaggttaattttggtagtatttattttattagataattttttattttatttaggtttttaaattgatgtgtagagagatgtgtaaagtatttttttatgatttttattttttttttgttttaatttttttttttatttgtatttttttatatttatgattttatttttttttttgattatattagtataatttattttattttttgtaaagaattattgatagatttttgttttgtttattgtttttttattttattatttttaatattaatttttttttttatttttataatttttttttttttgtttttttgaaatttattttgttgttgttgttttggttgtggtttttttttttttttttttttgtgagataagtttttgttttattgttttggttggaatgtagaggaaagattatagtttatagttttaaatttttgggtttaagtgatttttttattttagtttttgaagtagttaggattataggtatgtattattatatttggttaattttttttttaagtatttgtagagatggggtattaaaattttgtgtttaggtgatttttgtgttttagttttttaaagtgatgggattataggtatgagttattatgtttagtttaaaatgaatgatatatttgaaaaaatatgtttagtataaaatttggatttaggattataaaatttaatagaatatatttttatttttgtggtataaatttatgaatttgtatttgggtttgattttaatttttattgtttaataaaatattaggattaatatatttattaaatatgtgggaatagttaatagttattaaatttttattttatgtttagtattgaggtagaaattttggtagtataaaagaagaggtaatatttttttatgtttttttatattttaaaatattttttagaaattggtaaattattagtttttataaagaatttttgagtattagttatttagatgatagaagtatttttagtttgtaaattttggtttgttatgatagatattgattattgtaataagaatttattttttgatatattttatttgtataataaatgatgataagattaatgtttataaaattatttatgattattattattgtgatatagtttgaggaataaatgatataggtaaagtaaatgaggttttaaaatattggtatttttttattataataaagtttttatagtttttattattgtagtatttatatggaatatttatgtatatatgtaattaaataatagaaatatatttaatatagtttaatttgtgattatttgaaaataatagtaaatgttaaattgtgttgaattgtgaaatgtatattattttatttatttatttgtttatttattttttatatattattttaaatgaattttgttgatttttttttattttgtggttgaaaaataatagattagaaataaattagtgtaattaaagatgtaagttaatagttatagaaatagattgatgatttagaggagtgtttaatgtgtattataattatttagagggttttttataatatagattgttggattttatagttagaatttttgatttagtaagtttgagaattttgagaaatttgtatttttaataagttttgaggtgttgttaatgttgtaaagattattatgaattagatgttatttgattttgtttatttttttgatggtattaatattttaaaataaatgtttttaattttaatttgatatgaattaaaatgaatttattgaagttagggttgtttagttgtttatttttttttgttattagtttaatttttttatttaatttattttttaatttgttgttagaattattttttaaaaggtaaattttattatatttgttttttttttagtttttagtgtaaagttgaaattttttagttaaatattttattaattgatttttattgatgttttaggatttagtttttgaagttttttttgtattttttttattttttagttggaattaaatgttttttttttggaaattatagtttttggattataagtgtattttatatagtattttatatttgtttatttatttgttttgagtttatttaaatttttagagtataggaatggaattttatttgtttttatagttttagtttttggtatattgtttagtatttagtagaagtttaataaatagttgttgaatgaattaattaaaattttttggtaatgtattaaggatgtaaatattttgtaaagtgtagttgtttagaaaaaaattttatattttatagataatgtggataaataaaattagaattgtaattttgaaattttgtttatttatattttttattatggtagatttttttaattttaagaatttgtgaaagtatttgtaatttttttaatttattgagttaaaaattttgtaaataattttatagaatataaggaatagtgtatttttaagatagttattttttatatataaaatgttatggaattaaagtgttaaataggtgaatgttatttgaggtgtttaaatatgagtaataggttaaagaagagattagagattagagatattgtggtattgaagtaataaggtggtgatagaagtgaatgttagattgtaatatttgatgttaaatatttataaattttaaaatttaattgaaatgtaaaagttaaatatatagggaatatatttttaaattttggtgtagattgattttttaaaaatatagtatgtatttattttgaataaaaaatatttttgattttgatttgtaaagggattttggaattttttttagaagagaaaatgagggtattataaattatataatattaaaaataagtgtaaattttttttgaaagtatattgagggttaaaattatttttaattgttataattaaatatagagggaattagggatttgaatagagaatttttgtattatatttgaaaatttttaataattagtagtattattagaattttatatttaaaaataatttttttgttagtgtgatagatttgttttttaggaattttgttagttttaggtgaatttattaataagtagaaagagaaatgatagatattttataattgattatatttaaaatttttttttagtattttgttagaatgaaataatttatttaaaatatatattgtatgtgttaatttatgaataggggaaaatataaaatagaattgtgttaaagttaaaaaatattatttaatatttttatagaaatgtagtttgaaattgaaggataaatttggtaaattatatttatttaatgaagttttaggatagatgtttttaatataattatatgtgtagaatgttaatttttaaatatttaaatatta

SEQ ID NO: 193 - DNA, 5001 bp, Artificial Sequence
  chemically treated genomic DNA (Homo sapiens)
taatatttggatatttaaaaattaatattttgtatatataattatattaggaatatttattttaaagttttattgaataaatgtaatttattaaatttgttttttaattttaaattatatttttgtagaaatattggataatattttttagttttgatataattttgttttatatttttttttgtttatgggttaatatatgtaatatgtattttaaataaattattttattttaataaaatgttgaaaggagattttaaatatagttaattatgaaatgtttgttatttttttttttatttattgatgaatttatttaaaattgataaaatttttgaaaggtaaatttgttatattgataaggaaattatttttaaatataagattttgatgatattgttagttgttgaaaatttttaggtatgatataaaaattttttatttaagtttttgattttttttatgtttagttatgatagttgaaagtaattttgatttttaatatatttttaaggagaatttgtatttatttttagtgttatgtgatttgtaatgtttttatttttttttttaggaagaattttaaagtttttttgtaagttaaagttgaggatattttttatttagggtaggtatatattgtatttttaaaaaattaatttatattaaaatttaaaaatatgttttttgtgtatttaatttttatattttaattaagttttaaagtttatagatgtttggtattaggtgttatagtttgatatttatttttgttattattttattgttttaatattatagtatttttgatttttgattttttttttgatttattgtttatgtttaaatattttaaatagtatttatttatttgatattttaattttatgatattttatgtatagaaagtaattgttttaaagatatattattttttatgttttatggaattatttataaaatttttgatttagtagattggaagagttatgaatatttttataaatttttaaaattaaaagaatttgttataataaaaggtataagtagatagaattttaggattatagttttgattttgtttgtttatattgtttataaaatgtgaggtttttttttaggtagttatattttgtaaaatatttgtatttttaatatattattagaaagttttaattaatttatttaataattatttattgaatttttattgggtgttgagtaatgtattaagggttgggattataaagatagataggattttatttttatgttttaggaatttagataggtttaaaatagataagtaaataaatataaagtattgtgtgaaatgtatttgtagtttaaaggttgtgatttttaaaagaaaagtatttaattttagttggggaatggaagaggtatagagaagattttaagggttgaattttgaagtattaatgggaattggttgatgaaatatttagttaagaaattttagttttatattaaaggttaaggagggggtaaatgtggtaagatttgttttttggaaaataattttaatagtaaattagagaatggattgaatgaaggaattggattgatagtaggaagaagtaagtagttaaatagttttgattttagtaagtttattttggtttatattaaattaaaattgagaatatttgttttaaaatgttggtattattaaggaaataagtaaagttaaatagtatttagtttatggtggtttttgtagtattagtagtattttagaatttgttagaaatataaattttttaggatttttagatttattaaattagaaattttggttatggggtttagtagtttatgttgtaaaaagttttttagatgattgtgatgtatgttaaatatttttttaaattattaatttgtttttatgattgttagtttgtatttttagttatattgatttatttttaatttattattttttagttatggaatggaagaaggttagtagggtttatttaaaatggtatgtgagaaataaataaataaataaataaataaaatagtatgtattttatagtttaatatagtttgatatttgttgttgtttttaaatagttataaattaaattatgttaaatgtatttttattatttgattgtatatgtatatgaatgttttatataaatattataatgataggagttgtaagggttttattgtaatgagaaaatattagtattttagggttttatttgttttgtttatgttatttattttttagattatgttataatagtaatgattataagtgattttgtagatattgattttattattatttattgtgtaagtaggatatgttagggaatgaatttttattgtagtaattagtgtttattataatgggttaagatttatggattgaaagtatttttgttatttaaataattgatatttaaagattttttataaaagttagtgatttattagtttttagagaatattttaaaatgtggaaagatatgagagaatgttatttttttttttgtgttattagaatttttattttagtgttggatatagagtagaaatttagtagttgttgattgtttttatatgtttaataaatatgttaattttaatattttattagataataaaagttgaaattaaatttaaatgtagatttataaatttatattatagaaataaaagtgtattttattaagttttgtaattttaaatttagattttatgttgaatatatttttttaaatatattatttattttagattgggtatagtggtttatgtttgtaattttattattttgggaggttagggtatgaggattatttgagtataggattttgatattttatttttataaatatttaagaaaaaaattagttagatgtggtggtgtatgtttgtagttttagttattttagaggttgagatgggaggattgtttgagtttaggagtttgaggttgtgagttatgattttttttttgtattttagttaaggtaatagaataagaatttattttataaaaaaaaaaaaaaaaaaaaattataattaaaataataataataaagtaaattttaagaaggtagaaggaagaaagttataaaaatgaaagaagaaattgatgttaaaaatagtaaagtagaaggatggtaaataaagtaaaaatttgttagtaattttttataaaaaataaaataaattatattagtgtaattaagaaaaaggataaaattataaatatagaaaagtataaatgaaaagagaaattaaaatagagaagaaataaaaattatgaaagagtattttgtatatttttttatatattagtttggaaatttggataaaatggaggattgtttaataaagtaggtgttattaaaattgattttagaagaaagaaaaatattaaatagattaataggtatggggaaaaaattggaatatgttatttagaaattatatttgtggttgggtatggtggtttatgtttgtaattttagtattttgggaggttaaggtgggtggattatttgaggttgggagtttgattagtttgattaatatggagaaattttgttttttttaaaaatataaaattagtttggtgtggtggtgtatgtttgtaattttagttatttgggaggttgaggtaggagaattatttgaatttaggagggagaggttgtagtgagttaagattgtattattgtattttagtttgggtaataagagtaaaaaaaaaggaaattatgtttatttaaaattatattttgttttaaaaagaagaagaagaagaaaaaaaagaaattatatttataatatatttttaaaaagtattaagttaataattttgaatttttttagtttagagaaagaagaaaaattatttaatatttttatgaagttagtataatattaatataaaaatttttaaaaagtataaaaaaatgaaattgtaagtaaattgtatttataaatattaatgtaaaaatttaaaaggaatattattaaatagtatttattagtatatttaaataattttatgattttattaagatttgttttagtaatttaaggatggttgtttaatgttaagaagtgtgttaaaagtttttattattagaagaaaaattatgataattttaatagatgtttttggtaaaattttatattaatttttgatttattaggaagagattaaattttttttgatatgatttatataatggttttaaattaagttagtatagtagttgatttgttagtgaaatattttggagtttttttgttaatgttaggaataagataaagatattttttaattttttatttaatgtagtttttaatgtgttagttaatttaattagaaaagaaagaaataaaagatttaaatagtggaaaagtgaaggaaaaatttaatgtgtttatgggatataattaggaatttgaatttgtagattgtgtttggtattaatttttgttttagaagaggtttgataaattatgtttatataaggaatatgagaaaatatatttttaattttgtatttttttaaggaataaagaatagagagttaatggaaaagaaattattttattttttataatattataaatgtatattggtatttaaaaattttattaaatagtttaatattaaatgggaaaaaatatttgtgattgtaatattgaaataagtattagagtgtttataatgtgaaatagaatttaatttatgatttggtgaatttagtaaaaaaaaaaaaaaatttttaaaattgagaataattgttttatttagattatttttaagattagggtgtttataaattaatgtatttgtgattttattttattttgttaatagaaaaataatataataattattttttttttgttttttttatttgattttttaaggtttttttttattttgatgatttatatttatttagaaagtggttaaatataaaatagaatgat

SEQ ID NO: 194 - DNA, 2501 bp, Artificial Sequence
  chemically treated genomic DNA (Homo sapiens)
ttaggtttttaattaaaattttaaaggaagatatattttttttaatttattattgggaaaaagtttatttttttattaagcgttttttatttattttgttatttttagtattgaaagggttgtaagttataaatgaatgggtattaggaatttgatagttgatattttttttttaaaaaagtttagatattattttttatttatttagttgtttaaatataaattaagttgttttgttttgtttatttttaatttggaattattttttttttttttcgattattttttttttagtttttatttttattttttttttttgtttagtttgtttagtttttttgtatagtttagtaattagatatttatgtaatattttttttttaagaaatttatagtttataattaataggatattaataattttttttagttatgtgagaattatttgttttagtttttttttatattttataaaaagggaagaagggaaatattataaatgatttgtgggttagaatttttttgttttattatttttttttttttttttttttgagacggatttttgttttgtcgtttaggttggagtgtagtggcgttgttttggtttattgtaagtttcgtttgtcgcgtttacgttatttttttgttttagtttttcgagtagttgggattgtaggcgttcgttattatgttcggttaattttttttttttttttttttttttttgtatttttagtagagaatggttttatcgtgttagttaggatggttttgattttttgatttcgtgattcgtttatttcggttttttaaagtgttgggattataggcgtgagttatcgcgttcggtttttttttttattatttattgaagaattattagttttttggagagtatttgatatatagcgtgtattcggtaaatatttgtttaattgaattcggtatttattgtatttttagatgttataagtttgagattagtagaaagtgatgtagaatttagaatgggtgatatggtaaatgttttattaaatatagggttcggcgcggtggtttatatttgtaattttagtattttgggaggttaaggcgggtagattataaggttaggagtttgagattagtttggttaatatggtgaaatttcgtttttattaaaaatataaaaattagcggggcgtggtggcgggcgtttatagttttagttattcgggaggttgaggtaggagaattgtttgaattcgggaggcggaggttgtagtgagtcgagatcgtattattgtattttagtttgggcgatagagagagattttatattaaaaaaaaaaaaaaaaaaaaaaaaaggatatggattgtattttataaatagttgaattttttatttttattgttttgatagttggtttggtttttagaaatttagatttttttttttttaggtgagattatgcgaagaaaggaatattggtaaaattatttttttgattttttttttttaggttgttttttttttttttttaagattgtgtatttcgttttaaaaaaaaaagaaaaaaaaaagattgtagatttagtttataaatttataggattaagaatttttattaatattttttttaataattttaaatttttgatagtagtatttatttgatttcgttttgtatggatagatttattttaatttttttgtagattgttttaattttaagtagatgcgagagtataaaatagtgtatttgttttttttttaggtttttttggtagtattttgtttgtgaaattaagaggttttagttgttattagaagagggaaggagtaaggatgagtttttgaaaaaaaaaaaaaaaaaaaaatttagggtggagagagtggaaggatgtggttttaagagaggggggagggagggcgttattgtttgtggggcgggggcgggggtagttttgataatatagaatttcgagagattataagattgttttaggggggtggggtggggtggggtggggttgggggtttgtcgtttttttaggttttattttttgcggagattataaatagttatgattttagcgagatttagagatgttgtaatggtaagattttggattttttttgaggacgtggagaaaatttgttgttgagaaggatattttgaaggttttgttggttgaaaaagttgtttttggaattatttttagattttttttgaagatttgaattagattatagcgatggggatatagaaggtaagaatgatataattattggttatttttgtttgtttgggatatatttagaaaggtaaatattaatggtaatttttttgttttatttttttttaagttattaagttattttaaggtttttttatttcgtttttagtttgtattgttgtcgttttattagttttttttgaatgttatatagttttgtttattttattataggaaagttattcggagaagttgtgtttgttttttaggtttatttt

SEQ ID NO: 195 - DNA, 2501 bp, Artificial Sequence
  chemically treated genomic DNA (Homo sapiens)
aaaataaatttgagaagtaaatataattttttcgggtgatttttttatgataaggtgaatagaattgtatgatatttaaagagaattgatgaagcggtagtagtgtaggttagagacgaaatgaaaaggttttaagatagtttggtgatttaggagaaaatagaataaggagattattattaatatttgtttttttgagtgtattttaaataagtaaaaataattagtaattatattatttttattttttgtgtttttatcgttgtaatttaatttaagtttttaagaaagatttaggggtgattttagaaatagtttttttagttaataaaatttttaaaatgttttttttagtagtaagttttttttacgtttttaggaaggatttaaagttttattattatagtatttttgggtttcgttgggattatgattatttataattttcgtaaagggtggagtttgaaagggcgataagtttttagttttattttattttattttatttttttgaagtaattttgtgatttttcggaattttgtgttattagaattattttcgttttcgttttatagataataacgttttttttttttttttttttaaaattatatttttttattttttttattttgggttttttttttttttttttttttaaaagtttatttttatttttttttttttttaatagtagttagagttttttagttttatagataaaatattattagaaaagtttggagggagggtaaatatattattttatgttttcgtatttgtttgggattaaaataatttatagagagattagaataaatttatttatataaaacgaagttaagtgggtgttattattagagatttaaggttgttagaaagagtgttagtaagaatttttgattttatgaatttataggttgggtttataatttttttttttttttttttttttgagacggagtatataattttaaaggggagggaaagatagtttgagagaagaaaattagggaaataattttgttagtgttttttttttcgtataattttatttggagggaagaaaatttgaatttttaggagttagattaattattagggtagtaggaataagaggtttaattgtttatggaatataatttatattttttttttttttttttttttttttttgatatggagtttttttttgtcgtttaggttggagtgtagtggtgcgatttcggtttattgtaattttcgtttttcgggtttaagtaatttttttgttttagtttttcgagtagttgggattataggcgttcgttattacgtttcgttaatttttgtatttttagtaaagacggggttttattatattggttaggttggttttaaatttttgattttgtgatttgttcgttttggttttttaaagtgttgggattataagtgtgagttatcgcgtcgagttttatatttaataaggtatttgttatattatttattttgaattttgtattattttttgttagttttaagtttatagtatttagaaatgtaataaatatcgaatttaattaagtaggtatttgtcgaatatacgttatgtattaggtattttttaagaagttggtgattttttagtgaataatagaaaaaaaggtcgggcgcggtggtttacgtttgtaattttagtattttgggaggtcgaggtgggcggattacgaggttaggagattaagattattttggttaatacggtgaaattattttttattaaaaatataaaaaaaaaaaaaaaaaaaaaaaaaattagtcgggtatggtggcgggcgtttgtagttttagttattcgggaggttgagataggagaatggcgtgaacgcggtaggcggagtttgtagtgagttaagatagcgttattgtattttagtttgggcgatagagtaagaattcgttttaaaaaaaaaaaaaaaaaagaataataggataaaagagttttgatttataagttatttatagtgtttttttttttttttttttataaagtataaaaagggattagggtaagtaatttttatataattggaaaagattattaatattttattagttatggattgtgagttttttgaaagaaaagtgttatataagtatttgattattaagttatataagaaaattgaataagttaagtaggagaagaaaataggaatgagaattgagggagggataatcggggagagagaagagtggttttaggttgagagtaaataaagtaaaataatttggtttgtgtttaaatagttgggtaagtgagagatagtatttaggtttttttggaggaggaatattaattattaaatttttaatgtttatttatttgtagtttgtaatttttttagtattggaggtggtagggtgggtgaaggacgtttggtaaagagataaatttttttttagtggtgaattggagaaagtgtatttttttttagggttttggttgagggtttag

SEQ ID NO: 196 - DNA, 2501 bp, Artificial Sequence
  chemically treated genomic DNA (Homo sapiens)
tgttttgaatagttttatttgttagatttattaattgtgtaggtttttaatatttttaattattttataatttaataggatggataagtagttgggtagatggggatttgataggtgaaagggaaggaaagtttgttttttttttgagtagttgttgttttggtgaagatatagggtttgttataagttttatttattaatttttttatttatttatttttttatttatttatttatttatttatttttttatttatttatttatttttttattaattatttttttagttatttatttatttaatagttatttatttttttttttatttattttttttatttttatttatttatttatttatttatttatttatttaattatttatttattttagaaatatttattatgttttagtttagtttttttttaatattaaatgagattaggtttattgatttatggaatttttttgttttttaagtgttttttggaatggtatattgaagtgtgggaagaaaattttaaaatttttatttatattttttatttttttattttaataatgtttagttggagtgtatgttttataatgaacgtaatatattaatacgatagtgtgtatatagtttgaaattatatgtttaaaaaaattttgtattagtaaagtgtgtagttaggggtgtatagatttaaagattttggagattacggttatgaagattagtggtaagattatagagtaatttgggatagataggtattagtttttggggtgaaaattatgaagagtttttagtattataaagttgggtagttagaaaatatgtttgttatttagagtaaatgggtttatttttatttgattttattgtttatgattgtataggtggttattgtagtattagaaatagaggttagttttgttttagtttagttttttttttatatttttttaaagaagtatttggattgtggttcgggttttaaattaagagggtagatttttaaataattttattttttattagagtagttttaaatttttttgtttataggtgaaaatagagatttttagttaatgaaaatgtaaatatttgatatttatgtaattttgtattttatttatatttaatttttattattttataaaatatattaattcgagtaaataggatttttttttatatagattttttttagtatttttatcgatttatttaaaatgtttttataatttgtttataaggtagaatgaatatagattgtttttgaatatgatatttaagttttaaagttgtaaaatattttttttttttataggtattgaaaggtttgtttttggttatgttttttaaaagtaattttttttaaaaatattagaaaataaatgaaaataaaatgttagtattaattatgaatgagaaatttaaattgataaaagtaaaaattgttcgatatttttagagttgtaatttttagtaaaatagttaataattgattgagagttaattataaggggtttttttatagaatatggaagagtgtaaaggagtatttagtagttgtttaatagtaaagtttttattattgaaaatgataaaatttaggaagagaatataaaataaagaagaaaaaatgttttaagtttaggattttaagagttatataggtagtaaaatagaaatggttattttaagtttgagttttgtatttaattaatgatgttaatagaagtgtttattttgtgttgttgttttgtagaatgagttaatatattgggatttatttttaggaaattttaaaaaatgagtagattaaaaatgtgaggtagagaagtaaatattttgattttttgttttgatagaagaggtttatttagagtagaaaattttgttgaagagtttgttttttaatatgaatgagagtttttatttattgaatgaattgttaaaataatatttagtaatttaataaaattataaattaatatagagaagttgtattttgtttttttttattgaataataataaatatgtttttttaaaataaaatttaatagtttatgtagttttatatttaaaggtttttttatatatatttataattttgttggttaattttaagaataaaatataggtaaatattgaaataatttttaaataagttttttattttaaataaaatatttttgagatattttttaagaatatttagtataatagttttgtttgtgttaagatttttttaaatatatttttaattttatttattaattaagtttaaaagaaaaaaatatgaaaataaattatattttaaagttgatatgttttttgttgaaaattgattttttttttataaattttttaaaaatttattttttattttaaattgaaaatttatttaagttatagtatttatgtttaaataaggattttttgttgtttattttttgatatttttgaaatttagagtgattttgttttttttatgtttattaag

SEQ ID NO: 197 - DNA, 2501 bp, Artificial Sequence
  chemically treated genomic DNA (Homo sapiens)
tttaataagtataagaaaaatagagttattttggattttaaaaatgttaaaaaatgagtaatagagggtttttatttaaatataagtgttgtgatttaggtgaatttttaatttaaggtagaaaataagtttttaggaggtttgtaaaagaagaattaatttttagtagaaaatatgttaattttaaaatatagtttatttttatattttttttttttaaatttggttgataagtggaattaggagtatatttgaaagaattttagtataaataggattgttgtattagatgtttttaggaaatattttagaagtattttatttgaagtgaagaatttatttaagaattattttagtatttatttgtattttatttttgaagttggttaatagagttgtgaatgtgtgtgggaaggtttttgaatgtaaagttgtataagttgttaggttttgttttaaaaggatatgtttattattgtttaataaaaaagaataagatatagtttttttgtgttgatttgtgattttgttaaattgttaaatgttattttaataatttatttaataaataagaatttttatttatattaaaggataagttttttaatagaattttttgttttggataagttttttttattaaaatagggggttaggatatttgtttttttgttttatatttttggtttatttattttttagagttttttaaaagtaggttttaatatattaatttattttgtaaaataataatataaggtaaatatttttgttgatattattagttagatgtagagtttaggtttgaaataattatttttattttgttatttgtatggtttttgaggttttagatttagagtatttttttttttttgttttgtgttttttttttggattttgttatttttaatggtagaaattttgttattaaatagttattgagtatttttttgtatttttttatgttttatggggaaattttttataattaatttttaattagttgttagttgttttattgaagattatagttttaaaaatgtcgaataatttttatttttattagtttaagttttttatttataattaatattagtattttatttttatttattttttaatatttttgaagggggttgtttttagaaaatatagttaaagataaattttttagtatttatgaaagaagagagtattttatagttttgaagtttgagtattatatttaagaatagtttatgtttattttgttttgtgggtaaattatggaaatattttaggtgaatcgataaaaatgttaaaaaaagtttatataagaaaaaattttgtttgttcgaattgatatattttgtaagatgatagaaattgggtgtgaatgagatataaagttatatgaatgttagatatttatatttttattaattgaaaatttttatttttatttatgggtaagaaagtttgaggttattttggtagggagtgaggttatttaaagatttgtttttttggtttgaagttcgggttatagtttaaatgtttttttgaggaagtgtggaaaaagagttagattggagtaggattggtttttgtttttggtgttgtagtaattatttgtgtaattatgggtaataaaattagatgaaagtgggtttatttgttttgagtggtaggtatgttttttagttgtttagttttatggtgttgggggttttttatggtttttattttaaaagttagtatttgtttattttaaattgttttgtagttttattattaatttttatagtcgtggtttttaaaatttttggatttgtatatttttgattgtatattttgttagtgtaaaatttttttgagtatgtaattttaaattatatatatattatcgtattaatatattgcgtttattataaaatatatattttaattagatattattaaaatgaagagataagagatataaatagaagttttgaaattttttttttatattttaatgtattattttagaaaatatttgggaaataagaaaattttatagattaatgggtttaattttatttgatattggagagaaattaagttgaggtataataaatatttttggaatgaatggatgattggatgaatgaatgggtggataggtagatagatgaaggtaggaaagatggatgggaagagggatggatggttattggatgaatggatgattgaagggatggttggtggaaggatggatgaatgaatgaagggatggatggatgagtgaatgaataaaaggatggatgggtgaaggaattaataaataaagtttgtaataggttttgtgtttttattagagtagtagttgtttaagaagaagataggtttttttttttttttatttgttagatttttatttgtttagttatttatttattttgttgggttgtgaggtgattgaaaatgttgggggtttatatagttagtgaatttgataaatagggttgtttaagata

SEQ ID NO: 198 - DNA, 4001 bp, Artificial Sequence
  chemically treated genomic DNA (Homo sapiens)
gtttatttatttttattgtataattaggtgaatggaatatttttttaaggtatttaaatgatatttgaatttataggttagtaaattaggattcgtgggttaaatttggtttattatttgtgtttgtaaataaagttttattagaatatagttatatttatttatttaaatattgtttaggattgtttttgaattataatggtagtatttagtagttgcgatagagattgtatgttttataaaatttaaaatatttatttttgttttataggaaaagtgtattagtttttattaatttattttatgtatgaatgttagattaatgtttttaaaatgttattttattatattattttgtagtttagaattttgtaatgatattgtattgtttatgtaataaaatttaaattttatggttttttatggtatagttttagttaatttgttgagttattgatttttgtttttaaaggtaagttttataattagttagatttttttttttattgtttttggaatatgtagtgtatttttatttttgtttatttagttttttttgtttggaatgtattgtttatttgtatttatttaaattttatttattttttttttttttttttttttttgagatagagttttattttgtcgtttaggttggagtgtagtggtgtgattttggtttatggtaatttttatttattgggtttaagtgatttttttgttttagttttttaagtatttgggattataggtatgtattattatatttggttaatttttatatttttagtatagatggggtttcgttatgttggttaggttagttttaaattcgtgatttcgggtgatttatttattttagttttttaaagtgttgggattataggtatgagttattgtgtgttcggttttaaattttatttatttttaaaggattaatatgaattttatattttttatgattatgttagttatagtgattattaatgagtttgttgtttgagtatgtaaaggtttattgtttatattgtttggtaagtttttttttgtttagagaatggtttattaatatgatgatgggtaattttggagtgaggattttttgatggaataaagttatagttgtgggaaagtttgggaatggtttggaaatgataagatatgtaatgagaatatatgatatttaattaatatttgtggaaattttgagttattagttttttatatttatgatatatattttggttttgtatttaaatgtaggataattatatattttgatagttagtgggaatgattgataaagtttagtaagtttatttttgagagattttagaatgtagagatagtagttggattaggaagttttagttttattatgtgttatttttgagatggtggatgtgggttgtttttattgtgttttattttttttatttattgttatatattttatggttttgtatatattttgggattaagtaatattaattatgtattattgattggagttttttggtaaatggtattatatttttaaaatatttatgtgttttattttgttagggagattatattcgtgatttagatattatattttagtggtttaagattatgagttaatattttgtaaggtttgggtattgtatagaaaattttggttgtaatatatattattattatattgatttgaatagtaatggtataattatagtttcggaaatatagcgattatataaaataaaagttttcgttaatattgagtatagtagttaggttttcgtattgttgttgtttttaggatttggttgttgtattgttaaatgttattatgttttatttaataagtttttttttgtatatgtgagtaaacgaaaatgttttagtatagtaaatgttttagtaaattatttttgtacgttttggaaatagaatattaataaggaaattattatgagagtagatttttttgtttttatgaattatatttatatgatgtttattgtttatattggagaagtatagagaagaaaaatatgaagggtatattttaatggaaaggttatagtggaaatgtaaggaaaatatatttttttataattagtttttaggtattatttagaagtaaaattatgataataagattaatagtaaataatattgagtatttattttgtgttaggtattgttttaggttttttacgttatattattttatttaatttattttataattaagtggtttggatgtagttattatttttattttatgtacgagaagattaagatttagggaggtagaagaatttgttagaagttagataggtagtgagtggtagggttgggagttggattcggatagatagattttagattttatatttatcgtaattttagttgttttatttatatgaaatgttattttaaggttagtggtagtaaatataatttattttatttgtattgtttggtatgtttaattgggtgatttgttttataaaatttgaaataacgtttgtttatttatgtttgtgattttgattaaataaattttatttagaattttttattgttttattttatggtatttgtagtttgtaagaatttttgttttttggattgagacgtttttattttttgtgtttaaattaatattgtatagaatatggttttttgtgtgtgtgtgtgtgtgtgtgtgtgtgtgtgtgtgtgtgtttgtgtgtgtgtgtagaaatcgtttttttttttggattaaatttttgtagtttggttgagtgaggagaattttttttatttttcgagtttatagtagatatgttaggagaatgttgttgtttgtaatatatttagagacggtggggtaggtgatattgcgtgtgtgttcggtgtttttggaagtgtttatatagatgtgtgttgttgttgttgttgttttttgttttaaaatttttggagttaatatttatttatttttatagtttttgtttttttatttttaaggaaaaaagaaagaggtagattgaaatagaaggtaagcgataatagtttgacgagtagatatttttgttgtagtattttaaggtaagtagttgattttaggaatttattttattattagatatgtagattatatttcggagagttgggtagtgtttgttttgtcgtgaaggcgttgtcgttaattaaattagttttttttatttaattaggaaattattttttggttttttttgtgaattttttaaatttagggtattattatagtattttaatttttgtaagtataagattatagtgtgtatgtggatagggtggagggtttgtgcgtgtgaagtgtggtggttatatatagaaattggatgagaatattttatagggtgggtgaggtagtattttaggattgttttttttatgtataggtgttgggtgtgtttgtttagagattttaaaagatatattttacggaacgttttttttatttatttaaaaatattagtatttttttttttgatatggagaaaagggagattaaacgatgtgatttgataaaagaataatattgtgtattttagattatttatttattttatttgtattttaataattttgaaagtgttttgtgagagtaagtagttggttaaagatggttttgaaatgatttgatttagacgggtttttatggtattatttaaaaagagagagagagagagatagtatataagagttgtttattttttttttaaaatatgatgtatttaagtatcgtaattgattatagtttaggagaaagttttgttattgttataaggattttattggttgtagaatgttgttttttatatgtttagagaataatgtgattatattttaatggttagtcgggagttgttgtttgtttttgattgtttttgggttttttggtaggaaaatttttttttgtttattttatgttgttgtgatattgtttgtatagagttgtattgtttagaggattgggtggg

SEQ ID NO: 199 - DNA, 4001 bp, Artificial Sequence
  chemically treated genomic DNA (Homo sapiens)
tttatttagttttttgagtaatgtagttttgtgtaggtaatgttatagtaatatgaggtaagtaggagaaggtttttttgttaaaaagtttaggagtagttaaaggtaagtaataattttcggttggttattggaatgtggttatattattttttgaatatgtgaaaagtaatattttgtaattagtggggtttttgtgatagtgatagagtttttttttgagttgtaattaattacgatgtttaagtgtattatgttttaaagaaaaaataaatagtttttgtgtgttgtttttttttttttttttttttagatggtattatggagattcgtttgagttaaattattttaaagttatttttgattaattgtttgtttttatagaatatttttaaaattgttaaagtataaataaaataaatgaataatttgaaatatatagtgttgtttttttattagattatatcgtttaattttttttttttttatattaagaaaggaaatattaatatttttaagtgaataaaaagaacgtttcgtgaaatatattttttggggtttttgagtaaatatatttagtatttatgtatgggagaaataattttgaaatgttgttttatttattttgtgaagtatttttatttaatttttatatatagttattatattttatacgtataaattttttattttgtttatatgtatattgtaattttatgtttgtagaaattggaatgttgtaataatgttttgaatttgagaaatttataagaaaagttaagagatggttttttgattgaatgaaaaaggttggtttggttggcggtagcgtttttacggtagggtaggtattgtttagtttttcggagtgtgatttgtatgtttaataatggaataggtttttgggattagttgtttattttggaatgttgtagtagaagtatttgttcgttaagttgttgtcgtttgttttttattttagtttgttttttttttttttttttgaaaataaagagatagaggttgtaagagtgggtgggtgttggttttagaaattttaaggtagaaagtagtagtagtagtagtatatatttgtatagatatttttagagatatcgggtatatacgtagtgttatttgttttatcgtttttgggtgtgttgtaagtagtagtatttttttaatatgtttgttgtaggttcgaagagtgggagaaattttttttatttagttaggttgtaagaatttaatttaaaagaaaagacggtttttatatatatatatagatatatatatatatatatatatatatatatatatatatatagagaattatgttttgtgtagtgttaatttggatataaagaataaaaacgttttaatttaaaagatagaggtttttataaattgtaaatattatagaataagatagtgggaaattttgggtgagatttatttgattaaaattatagatataaataagtagacgttgttttaaattttgtaggataaattatttagttggatatattaaataatgtaaatgaaatgggttatatttgttgttattagttttggggtagtattttatgtgggtggggtagttgaggttacgataaatatgaaatttggaatttgtttgttcgggtttaatttttagttttattatttattatttgtttgatttttgataagtttttttatttttttgggttttggttttttcgtatataaagtggagataataattgtatttaaattatttagttgtggagtggattaaataagatgatgtaacgtaaaaggtttagaataatatttggtatagagtaagtgtttaatgttatttgttgttagttttattgttataattttatttttaggtaatgtttagaagttggttgtaaagggatatattttttttgtatttttattataatttttttattagagtgtattttttatattttttttttttatatttttttaatgtggataataaatattatatgaatgtgatttatgagaatagaaaggtttgtttttatgatagtttttttgttaatgttttgtttttaaagcgtataggagtggtttgttgagatatttattatattggagtattttcgtttatttatatatgtagggagaaatttattagataagatataatggtatttgataatataatagttaaattttagggataataataatgcggaagtttggttgttgtgtttagtgttaacggaagtttttattttatgtagtcgttatgttttcggggttatgattgtattattgttatttaaattaatgtaataataatgtgtattataattaaggttttttgtgtaatgtttagattttataaaatattagtttataattttaagttattagaatatgatatttaagttacggatataatttttttgataaagtaagatatatgaatattttaggaatgtagtattatttattaaagaattttaattaatggtgtataattgatgttatttaattttagagtgtgtgtaagattataaaatatatgatagtggatgggaaaagtgaggtatagtgggaatagtttatatttattattttagagatggtatatgataaagttagggttttttggtttagttgttatttttatattttagaattttttaagagtagatttattggattttgttagttatttttattggttattaagatatgtagttgttttatatttaaatatagaattaagatgtatgttatagatatgagaggttgatgatttaagatttttataaatattaattgagtgttatgtgtttttattatatgttttgttatttttaaattatttttaggtttttttatagttgtgattttgttttattagaaagtttttattttagagttgtttattattatattggtgaattattttttgagtagaagaaaatttattaggtagtatgggtagtggatttttatatgtttaagtagtaggtttattggtgattattgtaattgatatggttatgaaggatgtagagtttatgttagttttttaagaatgggtaggatttagggtcgggtatatagtggtttatatttgtaattttagtattttgggaggttgaggtgggtggattattcgaggttacgagtttgagattagtttagttaatatggcgaaattttatttatattaaaaatataaaaattggttaggtgtggtggtatatgtttgtaattttagatatttgggaggttaaggtaggagaattatttgaatttagtgggtagaggttgttatgagttaagattatattattgtattttagtttgggcgatagagtgagattttgttttaaaaaaaaaaaaaaaaaaaaggaatgagtaggatttaggtagatataaatgggtaatatattttaagtaaaaggaattaggtgaataagggtagaaatgtattgtatattttagggataatgaggaggaaaatttaattggttgtagggtttgtttttaggaatagagattaatgatttaatagattggttaggattatattatggagggttatgaagtttagattttattgtatggataatgtaatgttattgtagggttttaagttatagaatgatatggtgaaatggtattttaggaatattaatttggtatttatatataaggtggattaataggggttgatatattttttttataaaataaaagtaaatattttagattttgtgggatatatagtttttgtcgtaattattgaatgttattattgtagtttaaaaatagttttggataatatttaaatgaatgagtgtggttgtgttttaataaaattttatttgtaaatataggtagtgggttagatttggtttacgggttttagtttgttgatttgtggatttaaatattatttaagtgttttaggaggatgttttatttatttggttgtgtagtaaggatggatgaat

SEQ ID NO: 200 - DNA, 2501 bp, Artificial Sequence
  chemically treated genomic DNA (Homo sapiens)
ttttatagggattagtaatagttgtaatataagagagtaagatttaaaaatagtaggtggtttgaatattttataaaaacgtatttatatattatttataaaatttttaagaatgaatttttaaagttttattttgtttttatggttagttattgatattggtttatagggttttagttggtatttgtatgttgatattttttaattttgttttaatttaggtgattttaataagttgtagatttaaatatttagtagtaattcggaagttttttttcgttggattttttatatatattttatttttttagtatttttttttaagtaggtataaattaaatgtttgagatattttagatatttttttaaattttatatttagttagttatgttgatttaatgtttgaatcgttattttttttaatttttaaagttatattttttatttaggtttttattttttatttaagttagtataaaaatttaattgttttttttgggcgttatttttttttttttttaatttattttttaaattataattaaaaaaatttattaaaatataaattgaaatatattagttttttaattaatttttttatttaaatttttaattattatattaaaatttgtaattggttattatagtattgaaaataaaattttaatagattttaaagttgtttatgatttttttttattttaagtttttatattttagttatgttaaatgttttaaagtgcgttttagaatgtattttatttttatttatttgttaaaggttatttttgttaaatagtttttttggaatagttttttttttatgaagattgaatatgaaagttttttgttttttatgatatttatttaattatggtattttgatgattataggtgattaaaagttaattttttagttaattataagattttaaaggtaaaatgttttatttttgtatttttattgtttgatattagggggattgaataaatatttatatattttgttttggaaggtattttagaattaattttggttttttttttatttttttattgaatgtttgttatgttttgtaatcgacgtattgagcgaaagtttagttttttgaatattttttgtgatggggaagttatttattaaatattaatattaataaggttttatgttggatattatatatagaattttattagaaggagtttatagttgagtttgttttttgatatttgataagattaagtttttgttgtgattgtagttggaagttgttgatttttagattgttataggttttagaaatatttggtagaaggaatattggtgaaatgattgttagaattgggtacgggaagaatagttttatatttagtagagaggagatatattggtttaaggttaatgtttaggagttaattggtatttcgagtggatatatttaattaaatgggaaagtaaagtttgttaagatttaatttttaattagatgaaattttattaatgttaagtgtaaatatttaattttttagtttgggtatagtggtttacgtttgtaattttaatattttgggaggttgaagtgggcggattatttaagtttaggaatttgagattagtttggttaatatggtaaaattttgtttttattaaaaatataaaaattagttaggtatggtagtttgcgtttgtagttttagttattagagaggttgaggttggagaattatttgaattcgggaggtggaggttatagtaagttgagatcgtattattgtattttagtttgggtagtaaagtaatattatgttttaaaaaaaaaattttttttaattatttagaaaattattttttaaaaataataaagttgtaatatttttaaatagttaatattgttgggatttttttagaattttttaatattatgttgttaaaaagaaaaagtttaatggtaatatttttttttaatgttaaaagaatttaagagaaaggagaaaaaaattatttaaattattttattgaaggagataagttatttagatattaattggttgtaggtaaagggaataaatatggtgaagttaggtttgttggtaaaggggagatagtattaaacgttttgtttaataaatatttagaatttagggtttttatatttttttatggtttaattttttataggttattttttatttaaaggattatggagattaaataagataggatttttttaggtattaatttagagtttttaggtttttttttagttaaggtatcgagtgaaaatataatttatttttcggatttttttggaggattaaaaagtttttttcgtattgtaatgttatgttttttgtttttggttttgttttttacgtattgaaaaataaaagaagggggggagaaaagaaatagtagattatgttattatttatagtagtttattatttagaaatatttgtaaaatataaatgttttttgaggttaatagggtttaaattt

SEQ ID NO: 201 - DNA, 2501 bp, Artificial Sequence
  chemically treated genomic DNA (Homo sapiens)
aaatttaaattttgttaattttaaaggatatttatattttgtaaatatttttaaatagtaaattgttataaatagtgatataatttgttgttttttttttttttttttttttttattttttagtacgtagaaaataggattaagagtagggagtatggtattgtaatgcgaaagaaattttttaattttttagaggaattcgaaaaataaattgtatttttattcgatgttttggttgagagaagatttaaagattttgggttgatatttgaaagaattttgttttatttggtttttataattttttgaatggaaagtgatttgtgagagattgaattatggagaaatatgaaaattttggattttgagtatttgttgggtagggcgtttagtattgttttttttttattagtaaatttgattttattatgtttattttttttgtttataattagttaatatttgagtaatttattttttttaataaaataatttaaataatttttttttttttttttttagatttttttggtattagaggaaaatgttgttattaggttttttttttttgataatatgatgttgaagaattttggggaaattttagtagtgttaattatttgaaaatgttgtaattttattgtttttaaagagtgattttttaaatgattaaaaaaaattttttttttgagatatagtgttattttgttgtttaggttggagtgtagtggtgcgattttagtttattgtaatttttatttttcggatttaagtgattttttagttttagtttttttagtagttggggttataggcgtaggttattatgtttggttggtttttgtatttttggtagagatagagttttgttatgttggttaggttgattttaaatttttgagtttaggtgattcgtttattttagttttttaaagtgttgggattataagcgtgagttattgtgtttagattaaaagattaaatatttatatttaatattgataaaattttatttggttaggaattgagttttagtagattttgtttttttatttggttgaatgtgtttattcgaggtgttagttaatttttggatattaattttaggttagtgtgttttttttttgttgagtataggattgtttttttcgtgtttaattttagtagttattttattagtgttttttttgttaagtgtttttgagatttgtgataatttggaagttagtagtttttagttgtagttatagtaggggtttgattttgttaggtgttagggaatagatttagttgtgagttttttttagtggagttttgtgtataatatttagtatgaggttttgttggtgttggtgtttaataagtgatttttttattataggaggtatttaagaagttggattttcgtttagtacgtcgattatagagtataatagatatttagtgaaaggatggggaaagaattagaattaattttgaagtattttttaagataaagtgtatgaatatttatttagtttttttagtgttaggtagtagaaatatagaaatgagatattttgtttttagaattttgtagttaattgaaaagttgatttttagttatttgtaattattaaagtgttatgattaggtagatgttatagaagatagaggatttttatgtttagtttttatgaagaaggagttattttaagaaagttatttagtaaagatgatttttgataaatgagtgaaaatgggatatattttgaggcgtattttaaggtatttagtatgattagaatatgggagtttagagtggaggaagattatagatagttttgaaatttgttggaattttatttttagtgttgtgatgattagttgtaggttttaatatggtgattagggatttgggtagaggagttagttggaaggttgatatattttaatttgtattttagtaagtttttttggttatagtttgggggataaattggaggggaaggaagataacgtttaaggagagtaattaggtttttgtgttaatttgagtgagaaatgagggtttggatgaaagatgtggttttggggattaggaggagtgacgatttaagtattgagttagtatgattgattaggtgtagggtttaaggaagtgtttaggatgttttaggtatttgatttgtgtttgtttgggagggagtattggggaggtgaagtgtgtgtggaggatttagcgggagagggttttcgggttgttgttgggtatttaggtttgtagtttgttagagttatttggattagaataaaattgggagatgttagtatgtagatgttagttaaggttttgtaggttaatgttagtagttgattataagagtaggatgaaattttggaagtttatttttaaaaattttataagtaatatatgagtacgtttttatgggatatttaaattatttattgtttttaggttttatttttttgtgttgtagttgttgttgatttttgtagag

SEQ ID NO: 202 - DNA, 2501 bp, Artificial Sequence
  chemically treated genomic DNA (Homo sapiens)
aatatatatataaatatgtattatggttttaattgggggagtaagttttcgtggttgtgattttcgagtaaatatttgtttgttttagtggtatagtcgagttgattgttgttcggaaaagggtaagttattttgggaattaaatatataaggtgagagtagttagtgtcgtagttgttggtaaggtttttgttgataataatagaagtatattttttagaattggttattttgaaggtttaaaatagaatggaagcgattttatttatttaataattaaataaaattttagaaaagattaaatatgaaatgagtaagattttttataaaatattatttaaaaaaaattttttaaatagtatttatttatttatgggttgttttttatttttttattttttttattttttagttttatgatttaattttaaattagtaatatatagtatttagataagttatatttttttatttatagatagaagtaattatgaagtattataagggatttgtaattattaaagaagatgtagataaaataaattatttttaagttatggaaatttttattaaggaattttattagattaataagaaaaatttttatatttattaatatagttattttataaggatattttttaaatgttatttgatattatttttgttaatatttttaatgataattttgatgagttttaattttggattttttatggttattgttttttgtgatttaagaaatttttggttaattttttaagttataaaaatattatttgtttttagttaaaaagttttatatttttaaaatattatatttaggtttatgatttattttaaagttatttttgtgaggtagggggttattgtttatttttttttatatggatatttagttattttattttggttttatttgttgaaaagattttttttttttgttgaattgttttgttatttttgtcgaaattaagtgattatataaacgttgatttgtttttaggtttttttttttgttttattgttttatttgttaattttagtgttagtattatattgtattgattattaaatataatttattataataatttttatattgtttaataaaatttaagttttaataggaaagaatatataaattaagttgaaataaacgaatgagattaagatgagttttttttaaaaatttatttttaaaaattatattatggttttgaaaatattttataattattattgtattaatagtaaaatatatttatttataaataattgagagattatatattttttattatttttaattgaaattatgtatgaaaaatattttattcgtttttttattaattttttattaggtttttttttattagttttaagttatttaatattataattattaagtttaaaaataatttttaaaaatgtgttgaagttggaagatgggtatatattttttttaataaaataaattatgttaaattgattttataataaataataaaatgttaaagttatgtattaattttagaaatatttttgataaagaaaaaagtaggttattttttttaaaaaagaaagttttataaagttttttttaaagtttgatttgtaaaggaagattagaagtagaagattattataaagtaatttttaaattaatttttaaaaattaattgtgagtaaattatatatggtttttgaaaattgtaggttgtacgaaatttatttaaattggtatagaaagatttttattattattattatttttttaaaaaagtagataatatgaattgttagatttttagtttttttatatatagtttataagtttgaaataatattttattgagagtaatattaatattttttaagatttataatttttttttaatttgaaattttgttttgaagtataatatttagatttttttgaaataattttttaatatataaataaataattttaaatatttgaagaaaatttattaaaataaaattgagatgtttattatttttttattgatagtagtgaaaattattggaaattatatttttgttttttttaaatgatttatattaaaattatatttttttaaataattggtatagtagataaaatttagttttaaaatttttaaaatatttagatattaaagatagaaatattgatttttttttcgttaatgatgagaagaaataagataattagtttaattaagatttgataattgtaaattttaagtatttaaattatagataaggaatatcgtttgtgtattttttagttttatatggtagttagataattagaaaattaatagttgttagatttaatgttaaataatggaatttgggaaagtatttttaatattatttttatttaatatgtattatatgtatatgatgtaggtagggaagaagtttatgaatttatgtattaaagataagataggttggtattattgttaaacgtgtattgagttaattaggat

SEQ ID NO: 203 - DNA, 2501 bp, Artificial Sequence
  chemically treated genomic DNA (Homo sapiens)
attttaattggtttagtgtacgtttggtaatagtgttagtttgttttgtttttaatgtatggatttataaattttttttttatttgtattatgtgtatgtagtgtatattaaatgaaagtgatattaagaatgtttttttaaattttattatttgatattgagtttgataattgttagttttttggttgtttaattattatatgaagttagaaaatgtataaacgatattttttatttgtaatttaaatatttaaaatttgtaattgttagattttgattaaattggttgttttatttttttttattattaacggaaaaaaaattagtatttttatttttgatatttaagtgttttgaggattttaaaattgaattttatttgttatattagttatttgagaaagtatgattttaatgtaaattatttaaaaaggataaaagtataatttttagtgatttttattgttgttagtagaaaagtaataaatattttaattttattttagtaaattttttttaagtgtttggggttatttgtttatgtattagagaattgttttaggaaggtttgagtattatgttttaaagtaaaattttaggttaagaagaaattgtaaattttaaagaatgttggtgttatttttaatggaatattgttttaagtttgtaagttgtgtataaaaaaattggaggtttgatagtttatgttatttgtttttttaaaaagatggtagtggtgatgggggtttttttatgttaatttgaataaatttcgtatagtttgtagtttttaagagttatatgtaatttgtttataattgatttttaaaaattgatttgggagttgttttgtaataattttttgtttttaatttttttttgtaagttagattttaaagaagattttataaagtttttttttttaaaggaagtaatttatttttttttttattaagaatatttttgaggttgatatatgattttaatattttattatttattgtaaaattaatttagtataatttattttattagggagaatgtgtatttattttttagttttagtatatttttaaggattgtttttaagtttagtaattgtggtattaaatgatttagaattaatggagaaaaatttgataggaaattgatagaaaaacgaatgaaatattttttatatataattttagttggaggtaatggaaaatatgtagttttttagttatttgtgggtaaatatgttttgttgttgatatagtaataattatggagtgtttttaaagttatgatataatttttaaaaatagatttttaaggaaggtttattttgattttattcgtttattttagtttaatttatatatttttttttattgaggtttaaattttgttaagtaatgtgaggattattgtggtaagttgtatttagtaattaatatagtgtgatattggtattaggattgataaataaagtaatggaatagaagagagagtttgaaaatagattaacgtttatatgattatttgatttcgataaaggtggtaaaataatttaatagagaaggaaagtttttttaataaatggagttagaatagaatagttgaatatttatatagaaaaaagtgaataatgattttttattttataaaaatgattttgagatgaattatagatttaaatgtaatattttaaaagtatgaagttttttaattgaaaatagatgatatttttgtgatttggggggttagttaaaggttttttaggttatagaaagtagtaattataaaagatttaaaattagagtttattagaattgttattgaaagtgttaataaaagtaatattaaatgatatttgaaaaatatttttgtaaaatgattatattaataggtataaggattttttttattaatttaataaaattttttaataggaatttttatagtttaagagtggtttattttatttgtattttttttggtgattgtaaattttttgtgatattttatgattatttttgtttgtgaataaagaagtgtgatttgtttgggtgttatatgttgttggtttgaaattaagttatgaagttagagggtagagaaaatggaagaataaagagtaatttataaatagataaatgttatttggaaagttttttttaaatgatattttatagaaaattttgtttattttatatttagttttttttaaaattttatttaattattgggtaggtgaagtcgtttttattttattttaagtttttaaaatagttaattttaagggatgtatttttgttattattaataaaaattttgttaatagttgcggtattggttatttttattttatatgtttagtttttaagatagtttgttttttttcgaatagtagttagttcgattgtgttattaaaatagataaatatttgttcgggaattataattacggggatttgtttttttagttaggattatggtatatatttgtgtgtatatt

SEQ ID NO: 204 - DNA, 2501 bp, Artificial Sequence
  chemically treated genomic DNA (Homo sapiens)
ttaggtttttaattaaaattttaaaggaagatatattttttttaatttattattgggaaaaagtttatttttttattaagtgttttttatttattttgttatttttagtattgaaagggttgtaagttataaatgaatgggtattaggaatttgatagttgatattttttttttaaaaaagtttagatattattttttatttatttagttgtttaaatataaattaagttgttttgttttgtttatttttaatttggaattatttttttttttttttgattattttttttttagtttttatttttattttttttttttgtttagtttgtttagtttttttgtatagtttagtaattagatatttatgtaatattttttttttaagaaatttatagtttataattaataggatattaataattttttttagttatgtgagaattatttgttttagtttttttttatattttataaaaagggaagaagggaaatattataaatgatttgtgggttagaatttttttgttttattatttttttttttttttttttttgagatggatttttgttttgttgtttaggttggagtgtagtggtgttgttttggtttattgtaagttttgtttgttgtgtttatgttatttttttgttttagttttttgagtagttgggattgtaggtgtttgttattatgtttggttaattttttttttttttttttttttttttgtatttttagtagagaatggttttattgtgttagttaggatggttttgattttttgattttgtgatttgtttattttggttttttaaagtgttgggattataggtgtgagttattgtgtttggtttttttttttattatttattgaagaattattagttttttggagagtatttgatatatagtgtgtatttggtaaatatttgtttaattgaatttggtatttattgtatttttagatgttataagtttgagattagtagaaagtgatgtagaatttagaatgggtgatatggtaaatgttttattaaatatagggtttggtgtggtggtttatatttgtaattttagtattttgggaggttaaggtgggtagattataaggttaggagtttgagattagtttggttaatatggtgaaattttgtttttattaaaaatataaaaattagtggggtgtggtggtgggtgtttatagttttagttatttgggaggttgaggtaggagaattgtttgaatttgggaggtggaggttgtagtgagttgagattgtattattgtattttagtttgggtgatagagagagattttatattaaaaaaaaaaaaaaaaaaaaaaaaaggatatggattgtattttataaatagttgaattttttatttttattgttttgatagttggtttggtttttagaaatttagatttttttttttttaggtgagattatgtgaagaaaggaatattggtaaaattatttttttgattttttttttttaggttgttttttttttttttttaagattgtgtattttgttttaaaaaaaaaagaaaaaaaaaagattgtagatttagtttataaatttataggattaagaatttttattaatattttttttaataattttaaatttttgatagtagtatttatttgattttgttttgtatggatagatttattttaatttttttgtagattgttttaattttaagtagatgtgagagtataaaatagtgtatttgttttttttttaggtttttttggtagtattttgtttgtgaaattaagaggttttagttgttattagaagagggaaggagtaaggatgagtttttgaaaaaaaaaaaaaaaaaaaaatttagggtggagagagtggaaggatgtggttttaagagaggggggagggagggtgttattgtttgtggggtgggggtgggggtagttttgataatatagaattttgagagattataagattgttttaggggggtggggtggggtggggtggggttgggggtttgttgtttttttaggttttattttttgtggagattataaatagttatgattttagtgagatttagagatgttgtaatggtaagattttggattttttttgaggatgtggagaaaatttgttgttgagaaggatattttgaaggttttgttggttgaaaaagttgtttttggaattatttttagattttttttgaagatttgaattagattatagtgatggggatatagaaggtaagaatgatataattattggttatttttgtttgtttgggatatatttagaaaggtaaatattaatggtaatttttttgttttatttttttttaagttattaagttattttaaggtttttttattttgtttttagtttgtattgttgttgttttattagttttttttgaatgttatatagttttgtttattttattataggaaagttatttggagaagttgtgtttgttttttaggtttatttt

SEQ ID NO: 205 - DNA, 2501 bp, Artificial Sequence
  chemically treated genomic DNA (Homo sapiens)
aaaataaatttgagaagtaaatataatttttttgggtgatttttttatgataaggtgaatagaattgtatgatatttaaagagaattgatgaagtggtagtagtgtaggttagagatgaaatgaaaaggttttaagatagtttggtgatttaggagaaaatagaataaggagattattattaatatttgtttttttgagtgtattttaaataagtaaaaataattagtaattatattatttttattttttgtgtttttattgttgtaatttaatttaagtttttaagaaagatttaggggtgattttagaaatagtttttttagttaataaaatttttaaaatgttttttttagtagtaagttttttttatgtttttaggaaggatttaaagttttattattatagtatttttgggttttgttgggattatgattatttataatttttgtaaagggtggagtttgaaagggtgataagtttttagttttattttattttattttatttttttgaagtaattttgtgattttttggaattttgtgttattagaattatttttgtttttgttttatagataataatgttttttttttttttttttttaaaattatatttttttattttttttattttgggttttttttttttttttttttttaaaagtttatttttatttttttttttttttaatagtagttagagttttttagttttatagataaaatattattagaaaagtttggagggagggtaaatatattattttatgtttttgtatttgtttgggattaaaataatttatagagagattagaataaatttatttatataaaatgaagttaagtgggtgttattattagagatttaaggttgttagaaagagtgttagtaagaatttttgattttatgaatttataggttgggtttataatttttttttttttttttttttttgagatggagtatataattttaaaggggagggaaagatagtttgagagaagaaaattagggaaataattttgttagtgtttttttttttgtataattttatttggagggaagaaaatttgaatttttaggagttagattaattattagggtagtaggaataagaggtttaattgtttatggaatataatttatattttttttttttttttttttttttttttgatatggagtttttttttgttgtttaggttggagtgtagtggtgtgattttggtttattgtaatttttgttttttgggtttaagtaatttttttgttttagttttttgagtagttgggattataggtgtttgttattatgttttgttaatttttgtatttttagtaaagatggggttttattatattggttaggttggttttaaatttttgattttgtgatttgtttgttttggttttttaaagtgttgggattataagtgtgagttattgtgttgagttttatatttaataaggtatttgttatattatttattttgaattttgtattattttttgttagttttaagtttatagtatttagaaatgtaataaatattgaatttaattaagtaggtatttgttgaatatatgttatgtattaggtattttttaagaagttggtgattttttagtgaataatagaaaaaaaggttgggtgtggtggtttatgtttgtaattttagtattttgggaggttgaggtgggtggattatgaggttaggagattaagattattttggttaatatggtgaaattattttttattaaaaatataaaaaaaaaaaaaaaaaaaaaaaaaattagttgggtatggtggtgggtgtttgtagttttagttatttgggaggttgagataggagaatggtgtgaatgtggtaggtggagtttgtagtgagttaagatagtgttattgtattttagtttgggtgatagagtaagaatttgttttaaaaaaaaaaaaaaaaaagaataataggataaaagagttttgatttataagttatttatagtgtttttttttttttttttttataaagtataaaaagggattagggtaagtaatttttatataattggaaaagattattaatattttattagttatggattgtgagttttttgaaagaaaagtgttatataagtatttgattattaagttatataagaaaattgaataagttaagtaggagaagaaaataggaatgagaattgagggagggataattggggagagagaagagtggttttaggttgagagtaaataaagtaaaataatttggtttgtgtttaaatagttgggtaagtgagagatagtatttaggtttttttggaggaggaatattaattattaaatttttaatgtttatttatttgtagtttgtaatttttttagtattggaggtggtagggtgggtgaaggatgtttggtaaagagataaatttttttttagtggtgaattggagaaagtgtatttttttttagggttttggttgagggtttag

SEQ ID NO: 206 - DNA, 2501 bp, Artificial Sequence
  chemically treated genomic DNA (Homo sapiens)
tgttttgaatagttttatttgttagatttattaattgtgtaggtttttaatatttttaattattttataatttaataggatggataagtagttgggtagatggggatttgataggtgaaagggaaggaaagtttgttttttttttgagtagttgttgttttggtgaagatatagggtttgttataagttttatttattaatttttttatttatttatttttttatttatttatttatttatttatttttttatttatttatttatttttttattaattatttttttagttatttatttatttaatagttatttatttttttttttatttattttttttatttttatttatttatttatttatttatttatttatttaattatttatttattttagaaatatttattatgttttagtttagtttttttttaatattaaatgagattaggtttattgatttatggaatttttttgttttttaagtgttttttggaatggtatattgaagtgtgggaagaaaattttaaaatttttatttatattttttatttttttattttaataatgtttagttggagtgtatgttttataatgaatgtaatatattaatatgatagtgtgtatatagtttgaaattatatgtttaaaaaaattttgtattagtaaagtgtgtagttaggggtgtatagatttaaagattttggagattatggttatgaagattagtggtaagattatagagtaatttgggatagataggtattagtttttggggtgaaaattatgaagagtttttagtattataaagttgggtagttagaaaatatgtttgttatttagagtaaatgggtttatttttatttgattttattgtttatgattgtataggtggttattgtagtattagaaatagaggttagttttgttttagtttagttttttttttatatttttttaaagaagtatttggattgtggtttgggttttaaattaagagggtagatttttaaataattttattttttattagagtagttttaaatttttttgtttataggtgaaaatagagatttttagttaatgaaaatgtaaatatttgatatttatgtaattttgtattttatttatatttaatttttattattttataaaatatattaatttgagtaaataggatttttttttatatagattttttttagtatttttattgatttatttaaaatgtttttataatttgtttataaggtagaatgaatatagattgtttttgaatatgatatttaagttttaaagttgtaaaatattttttttttttataggtattgaaaggtttgtttttggttatgttttttaaaagtaattttttttaaaaatattagaaaataaatgaaaataaaatgttagtattaattatgaatgagaaatttaaattgataaaagtaaaaattgtttgatatttttagagttgtaatttttagtaaaatagttaataattgattgagagttaattataaggggtttttttatagaatatggaagagtgtaaaggagtatttagtagttgtttaatagtaaagtttttattattgaaaatgataaaatttaggaagagaatataaaataaagaagaaaaaatgttttaagtttaggattttaagagttatataggtagtaaaatagaaatggttattttaagtttgagttttgtatttaattaatgatgttaatagaagtgtttattttgtgttgttgttttgtagaatgagttaatatattgggatttatttttaggaaattttaaaaaatgagtagattaaaaatgtgaggtagagaagtaaatattttgattttttgttttgatagaagaggtttatttagagtagaaaattttgttgaagagtttgttttttaatatgaatgagagtttttatttattgaatgaattgttaaaataatatttagtaatttaataaaattataaattaatatagagaagttgtattttgtttttttttattgaataataataaatatgtttttttaaaataaaatttaatagtttatgtagttttatatttaaaggtttttttatatatatttataattttgttggttaattttaagaataaaatataggtaaatattgaaataatttttaaataagttttttattttaaataaaatatttttgagatattttttaagaatatttagtataatagttttgtttgtgttaagatttttttaaatatatttttaattttatttattaattaagtttaaaagaaaaaaatatgaaaataaattatattttaaagttgatatgttttttgttgaaaattgattttttttttataaattttttaaaaatttattttttattttaaattgaaaatttatttaagttatagtatttatgtttaaataaggattttttgttgtttattttttgatatttttgaaatttagagtgattttgttttttttatgtttattaag

SEQ ID NO: 207 - DNA, 2501 bp, Artificial Sequence
  chemically treated genomic DNA (Homo sapiens)
tttaataagtataagaaaaatagagttattttggattttaaaaatgttaaaaaatgagtaatagagggtttttatttaaatataagtgttgtgatttaggtgaatttttaatttaaggtagaaaataagtttttaggaggtttgtaaaagaagaattaatttttagtagaaaatatgttaattttaaaatatagtttatttttatattttttttttttaaatttggttgataagtggaattaggagtatatttgaaagaattttagtataaataggattgttgtattagatgtttttaggaaatattttagaagtattttatttgaagtgaagaatttatttaagaattattttagtatttatttgtattttatttttgaagttggttaatagagttgtgaatgtgtgtgggaaggtttttgaatgtaaagttgtataagttgttaggttttgttttaaaaggatatgtttattattgtttaataaaaaagaataagatatagtttttttgtgttgatttgtgattttgttaaattgttaaatgttattttaataatttatttaataaataagaatttttatttatattaaaggataagttttttaatagaattttttgttttggataagttttttttattaaaatagggggttaggatatttgtttttttgttttatatttttggtttatttattttttagagttttttaaaagtaggttttaatatattaatttattttgtaaaataataatataaggtaaatatttttgttgatattattagttagatgtagagtttaggtttgaaataattatttttattttgttatttgtatggtttttgaggttttagatttagagtatttttttttttttgttttgtgttttttttttggattttgttatttttaatggtagaaattttgttattaaatagttattgagtatttttttgtatttttttatgttttatggggaaattttttataattaatttttaattagttgttagttgttttattgaagattatagttttaaaaatgttgaataatttttatttttattagtttaagttttttatttataattaatattagtattttatttttatttattttttaatatttttgaagggggttgtttttagaaaatatagttaaagataaattttttagtatttatgaaagaagagagtattttatagttttgaagtttgagtattatatttaagaatagtttatgtttattttgttttgtgggtaaattatggaaatattttaggtgaattgataaaaatgttaaaaaaagtttatataagaaaaaattttgtttgtttgaattgatatattttgtaagatgatagaaattgggtgtgaatgagatataaagttatatgaatgttagatatttatatttttattaattgaaaatttttatttttatttatgggtaagaaagtttgaggttattttggtagggagtgaggttatttaaagatttgtttttttggtttgaagtttgggttatagtttaaatgtttttttgaggaagtgtggaaaaagagttagattggagtaggattggtttttgtttttggtgttgtagtaattatttgtgtaattatgggtaataaaattagatgaaagtgggtttatttgttttgagtggtaggtatgttttttagttgtttagttttatggtgttgggggttttttatggtttttattttaaaagttagtatttgtttattttaaattgttttgtagttttattattaatttttatagttgtggtttttaaaatttttggatttgtatatttttgattgtatattttgttagtgtaaaatttttttgagtatgtaattttaaattatatatatattattgtattaatatattgtgtttattataaaatatatattttaattagatattattaaaatgaagagataagagatataaatagaagttttgaaattttttttttatattttaatgtattattttagaaaatatttgggaaataagaaaattttatagattaatgggtttaattttatttgatattggagagaaattaagttgaggtataataaatatttttggaatgaatggatgattggatgaatgaatgggtggataggtagatagatgaaggtaggaaagatggatgggaagagggatggatggttattggatgaatggatgattgaagggatggttggtggaaggatggatgaatgaatgaagggatggatggatgagtgaatgaataaaaggatggatgggtgaaggaattaataaataaagtttgtaataggttttgtgtttttattagagtagtagttgtttaagaagaagataggtttttttttttttttatttgttagatttttatttgtttagttatttatttattttgttgggttgtgaggtgattgaaaatgttgggggtttatatagttagtgaatttgataaatagggttgtttaagata

SEQ ID NO: 208 - DNA, 4001 bp, Artificial Sequence
  chemically treated genomic DNA (Homo sapiens)
gtttatttatttttattgtataattaggtgaatggaatatttttttaaggtatttaaatgatatttgaatttataggttagtaaattaggatttgtgggttaaatttggtttattatttgtgtttgtaaataaagttttattagaatatagttatatttatttatttaaatattgtttaggattgtttttgaattataatggtagtatttagtagttgtgatagagattgtatgttttataaaatttaaaatatttatttttgttttataggaaaagtgtattagtttttattaatttattttatgtatgaatgttagattaatgtttttaaaatgttattttattatattattttgtagtttagaattttgtaatgatattgtattgtttatgtaataaaatttaaattttatggttttttatggtatagttttagttaatttgttgagttattgatttttgtttttaaaggtaagttttataattagttagatttttttttttattgtttttggaatatgtagtgtatttttatttttgtttatttagttttttttgtttggaatgtattgtttatttgtatttatttaaattttatttattttttttttttttttttttttttgagatagagttttattttgttgtttaggttggagtgtagtggtgtgattttggtttatggtaatttttatttattgggtttaagtgatttttttgttttagttttttaagtatttgggattataggtatgtattattatatttggttaatttttatatttttagtatagatggggttttgttatgttggttaggttagttttaaatttgtgattttgggtgatttatttattttagttttttaaagtgttgggattataggtatgagttattgtgtgtttggttttaaattttatttatttttaaaggattaatatgaattttatattttttatgattatgttagttatagtgattattaatgagtttgttgtttgagtatgtaaaggtttattgtttatattgtttggtaagtttttttttgtttagagaatggtttattaatatgatgatgggtaattttggagtgaggattttttgatggaataaagttatagttgtgggaaagtttgggaatggtttggaaatgataagatatgtaatgagaatatatgatatttaattaatatttgtggaaattttgagttattagttttttatatttatgatatatattttggttttgtatttaaatgtaggataattatatattttgatagttagtgggaatgattgataaagtttagtaagtttatttttgagagattttagaatgtagagatagtagttggattaggaagttttagttttattatgtgttatttttgagatggtggatgtgggttgtttttattgtgttttattttttttatttattgttatatattttatggttttgtatatattttgggattaagtaatattaattatgtattattgattggagttttttggtaaatggtattatatttttaaaatatttatgtgttttattttgttagggagattatatttgtgatttagatattatattttagtggtttaagattatgagttaatattttgtaaggtttgggtattgtatagaaaattttggttgtaatatatattattattatattgatttgaatagtaatggtataattatagttttggaaatatagtgattatataaaataaaagtttttgttaatattgagtatagtagttaggtttttgtattgttgttgtttttaggatttggttgttgtattgttaaatgttattatgttttatttaataagtttttttttgtatatgtgagtaaatgaaaatgttttagtatagtaaatgttttagtaaattatttttgtatgttttggaaatagaatattaataaggaaattattatgagagtagatttttttgtttttatgaattatatttatatgatgtttattgtttatattggagaagtatagagaagaaaaatatgaagggtatattttaatggaaaggttatagtggaaatgtaaggaaaatatatttttttataattagtttttaggtattatttagaagtaaaattatgataataagattaatagtaaataatattgagtatttattttgtgttaggtattgttttaggttttttatgttatattattttatttaatttattttataattaagtggtttggatgtagttattatttttattttatgtatgagaagattaagatttagggaggtagaagaatttgttagaagttagataggtagtgagtggtagggttgggagttggatttggatagatagattttagattttatatttattgtaattttagttgttttatttatatgaaatgttattttaaggttagtggtagtaaatataatttattttatttgtattgtttggtatgtttaattgggtgatttgttttataaaatttgaaataatgtttgtttatttatgtttgtgattttgattaaataaattttatttagaattttttattgttttattttatggtatttgtagtttgtaagaatttttgttttttggattgagatgtttttattttttgtgtttaaattaatattgtatagaatatggttttttgtgtgtgtgtgtgtgtgtgtgtgtgtgtgtgtgtgtgtgtttgtgtgtgtgtgtagaaattgtttttttttttggattaaatttttgtagtttggttgagtgaggagaattttttttattttttgagtttatagtagatatgttaggagaatgttgttgtttgtaatatatttagagatggtggggtaggtgatattgtgtgtgtgtttggtgtttttggaagtgtttatatagatgtgtgttgttgttgttgttgttttttgttttaaaatttttggagttaatatttatttatttttatagtttttgtttttttatttttaaggaaaaaagaaagaggtagattgaaatagaaggtaagtgataatagtttgatgagtagatatttttgttgtagtattttaaggtaagtagttgattttaggaatttattttattattagatatgtagattatattttggagagttgggtagtgtttgttttgttgtgaaggtgttgttgttaattaaattagttttttttatttaattaggaaattattttttggttttttttgtgaattttttaaatttagggtattattatagtattttaatttttgtaagtataagattatagtgtgtatgtggatagggtggagggtttgtgtgtgtgaagtgtggtggttatatatagaaattggatgagaatattttatagggtgggtgaggtagtattttaggattgttttttttatgtataggtgttgggtgtgtttgtttagagattttaaaagatatattttatggaatgttttttttatttatttaaaaatattagtatttttttttttgatatggagaaaagggagattaaatgatgtgatttgataaaagaataatattgtgtattttagattatttatttattttatttgtattttaataattttgaaagtgttttgtgagagtaagtagttggttaaagatggttttgaaatgatttgatttagatgggtttttatggtattatttaaaaagagagagagagagagatagtatataagagttgtttattttttttttaaaatatgatgtatttaagtattgtaattgattatagtttaggagaaagttttgttattgttataaggattttattggttgtagaatgttgttttttatatgtttagagaataatgtgattatattttaatggttagttgggagttgttgtttgtttttgattgtttttgggttttttggtaggaaaatttttttttgtttattttatgttgttgtgatattgtttgtatagagttgtattgtttagaggattgggtggg

SEQ ID NO: 209 - DNA, 4001 bp, Artificial Sequence
  chemically treated genomic DNA (Homo sapiens)
tttatttagttttttgagtaatgtagttttgtgtaggtaatgttatagtaatatgaggtaagtaggagaaggtttttttgttaaaaagtttaggagtagttaaaggtaagtaataatttttggttggttattggaatgtggttatattattttttgaatatgtgaaaagtaatattttgtaattagtggggtttttgtgatagtgatagagtttttttttgagttgtaattaattatgatgtttaagtgtattatgttttaaagaaaaaataaatagtttttgtgtgttgtttttttttttttttttttttagatggtattatggagatttgtttgagttaaattattttaaagttatttttgattaattgtttgtttttatagaatatttttaaaattgttaaagtataaataaaataaatgaataatttgaaatatatagtgttgtttttttattagattatattgtttaattttttttttttttatattaagaaaggaaatattaatatttttaagtgaataaaaagaatgttttgtgaaatatattttttggggtttttgagtaaatatatttagtatttatgtatgggagaaataattttgaaatgttgttttatttattttgtgaagtatttttatttaatttttatatatagttattatattttatatgtataaattttttattttgtttatatgtatattgtaattttatgtttgtagaaattggaatgttgtaataatgttttgaatttgagaaatttataagaaaagttaagagatggttttttgattgaatgaaaaaggttggtttggttggtggtagtgtttttatggtagggtaggtattgtttagttttttggagtgtgatttgtatgtttaataatggaataggtttttgggattagttgtttattttggaatgttgtagtagaagtatttgtttgttaagttgttgttgtttgttttttattttagtttgttttttttttttttttttgaaaataaagagatagaggttgtaagagtgggtgggtgttggttttagaaattttaaggtagaaagtagtagtagtagtagtatatatttgtatagatatttttagagatattgggtatatatgtagtgttatttgttttattgtttttgggtgtgttgtaagtagtagtatttttttaatatgtttgttgtaggtttgaagagtgggagaaattttttttatttagttaggttgtaagaatttaatttaaaagaaaagatggtttttatatatatatatagatatatatatatatatatatatatatatatatatatatatagagaattatgttttgtgtagtgttaatttggatataaagaataaaaatgttttaatttaaaagatagaggtttttataaattgtaaatattatagaataagatagtgggaaattttgggtgagatttatttgattaaaattatagatataaataagtagatgttgttttaaattttgtaggataaattatttagttggatatattaaataatgtaaatgaaatgggttatatttgttgttattagttttggggtagtattttatgtgggtggggtagttgaggttatgataaatatgaaatttggaatttgtttgtttgggtttaatttttagttttattatttattatttgtttgatttttgataagtttttttatttttttgggttttggtttttttgtatataaagtggagataataattgtatttaaattatttagttgtggagtggattaaataagatgatgtaatgtaaaaggtttagaataatatttggtatagagtaagtgtttaatgttatttgttgttagttttattgttataattttatttttaggtaatgtttagaagttggttgtaaagggatatattttttttgtatttttattataatttttttattagagtgtattttttatattttttttttttatatttttttaatgtggataataaatattatatgaatgtgatttatgagaatagaaaggtttgtttttatgatagtttttttgttaatgttttgtttttaaagtgtataggagtggtttgttgagatatttattatattggagtatttttgtttatttatatatgtagggagaaatttattagataagatataatggtatttgataatataatagttaaattttagggataataataatgtggaagtttggttgttgtgtttagtgttaatggaagtttttattttatgtagttgttatgtttttggggttatgattgtattattgttatttaaattaatgtaataataatgtgtattataattaaggttttttgtgtaatgtttagattttataaaatattagtttataattttaagttattagaatatgatatttaagttatggatataatttttttgataaagtaagatatatgaatattttaggaatgtagtattatttattaaagaattttaattaatggtgtataattgatgttatttaattttagagtgtgtgtaagattataaaatatatgatagtggatgggaaaagtgaggtatagtgggaatagtttatatttattattttagagatggtatatgataaagttagggttttttggtttagttgttatttttatattttagaattttttaagagtagatttattggattttgttagttatttttattggttattaagatatgtagttgttttatatttaaatatagaattaagatgtatgttatagatatgagaggttgatgatttaagatttttataaatattaattgagtgttatgtgtttttattatatgttttgttatttttaaattatttttaggtttttttatagttgtgattttgttttattagaaagtttttattttagagttgtttattattatattggtgaattattttttgagtagaagaaaatttattaggtagtatgggtagtggatttttatatgtttaagtagtaggtttattggtgattattgtaattgatatggttatgaaggatgtagagtttatgttagttttttaagaatgggtaggatttagggttgggtatatagtggtttatatttgtaattttagtattttgggaggttgaggtgggtggattatttgaggttatgagtttgagattagtttagttaatatggtgaaattttatttatattaaaaatataaaaattggttaggtgtggtggtatatgtttgtaattttagatatttgggaggttaaggtaggagaattatttgaatttagtgggtagaggttgttatgagttaagattatattattgtattttagtttgggtgatagagtgagattttgttttaaaaaaaaaaaaaaaaaaaaggaatgagtaggatttaggtagatataaatgggtaatatattttaagtaaaaggaattaggtgaataagggtagaaatgtattgtatattttagggataatgaggaggaaaatttaattggttgtagggtttgtttttaggaatagagattaatgatttaatagattggttaggattatattatggagggttatgaagtttagattttattgtatggataatgtaatgttattgtagggttttaagttatagaatgatatggtgaaatggtattttaggaatattaatttggtatttatatataaggtggattaataggggttgatatattttttttataaaataaaagtaaatattttagattttgtgggatatatagtttttgttgtaattattgaatgttattattgtagtttaaaaatagttttggataatatttaaatgaatgagtgtggttgtgttttaataaaattttatttgtaaatataggtagtgggttagatttggtttatgggttttagtttgttgatttgtggatttaaatattatttaagtgttttaggaggatgttttatttatttggttgtgtagtaaggatggatgaat

SEQ ID NO: 210 - DNA, 2501 bp, Artificial Sequence
  chemically treated genomic DNA (Homo sapiens)
ttttatagggattagtaatagttgtaatataagagagtaagatttaaaaatagtaggtggtttgaatattttataaaaatgtatttatatattatttataaaatttttaagaatgaatttttaaagttttattttgtttttatggttagttattgatattggtttatagggttttagttggtatttgtatgttgatattttttaattttgttttaatttaggtgattttaataagttgtagatttaaatatttagtagtaatttggaagtttttttttgttggattttttatatatattttatttttttagtatttttttttaagtaggtataaattaaatgtttgagatattttagatatttttttaaattttatatttagttagttatgttgatttaatgtttgaattgttattttttttaatttttaaagttatattttttatttaggtttttattttttatttaagttagtataaaaatttaattgttttttttgggtgttatttttttttttttttaatttattttttaaattataattaaaaaaatttattaaaatataaattgaaatatattagttttttaattaatttttttatttaaatttttaattattatattaaaatttgtaattggttattatagtattgaaaataaaattttaatagattttaaagttgtttatgatttttttttattttaagtttttatattttagttatgttaaatgttttaaagtgtgttttagaatgtattttatttttatttatttgttaaaggttatttttgttaaatagtttttttggaatagttttttttttatgaagattgaatatgaaagttttttgttttttatgatatttatttaattatggtattttgatgattataggtgattaaaagttaattttttagttaattataagattttaaaggtaaaatgttttatttttgtatttttattgtttgatattagggggattgaataaatatttatatattttgttttggaaggtattttagaattaattttggttttttttttatttttttattgaatgtttgttatgttttgtaattgatgtattgagtgaaagtttagttttttgaatattttttgtgatggggaagttatttattaaatattaatattaataaggttttatgttggatattatatatagaattttattagaaggagtttatagttgagtttgttttttgatatttgataagattaagtttttgttgtgattgtagttggaagttgttgatttttagattgttataggttttagaaatatttggtagaaggaatattggtgaaatgattgttagaattgggtatgggaagaatagttttatatttagtagagaggagatatattggtttaaggttaatgtttaggagttaattggtattttgagtggatatatttaattaaatgggaaagtaaagtttgttaagatttaatttttaattagatgaaattttattaatgttaagtgtaaatatttaattttttagtttgggtatagtggtttatgtttgtaattttaatattttgggaggttgaagtgggtggattatttaagtttaggaatttgagattagtttggttaatatggtaaaattttgtttttattaaaaatataaaaattagttaggtatggtagtttgtgtttgtagttttagttattagagaggttgaggttggagaattatttgaatttgggaggtggaggttatagtaagttgagattgtattattgtattttagtttgggtagtaaagtaatattatgttttaaaaaaaaaattttttttaattatttagaaaattattttttaaaaataataaagttgtaatatttttaaatagttaatattgttgggatttttttagaattttttaatattatgttgttaaaaagaaaaagtttaatggtaatatttttttttaatgttaaaagaatttaagagaaaggagaaaaaaattatttaaattattttattgaaggagataagttatttagatattaattggttgtaggtaaagggaataaatatggtgaagttaggtttgttggtaaaggggagatagtattaaatgttttgtttaataaatatttagaatttagggtttttatatttttttatggtttaattttttataggttattttttatttaaaggattatggagattaaataagataggatttttttaggtattaatttagagtttttaggtttttttttagttaaggtattgagtgaaaatataatttattttttggatttttttggaggattaaaaagttttttttgtattgtaatgttatgttttttgtttttggttttgttttttatgtattgaaaaataaaagaagggggggagaaaagaaatagtagattatgttattatttatagtagtttattatttagaaatatttgtaaaatataaatgttttttgaggttaatagggtttaaattt

SEQ ID NO: 211 - DNA, 2501 bp, Artificial Sequence
  chemically treated genomic DNA (Homo sapiens)
aaatttaaattttgttaattttaaaggatatttatattttgtaaatatttttaaatagtaaattgttataaatagtgatataatttgttgttttttttttttttttttttttttattttttagtatgtagaaaataggattaagagtagggagtatggtattgtaatgtgaaagaaattttttaattttttagaggaatttgaaaaataaattgtatttttatttgatgttttggttgagagaagatttaaagattttgggttgatatttgaaagaattttgttttatttggtttttataattttttgaatggaaagtgatttgtgagagattgaattatggagaaatatgaaaattttggattttgagtatttgttgggtagggtgtttagtattgttttttttttattagtaaatttgattttattatgtttattttttttgtttataattagttaatatttgagtaatttattttttttaataaaataatttaaataatttttttttttttttttttagatttttttggtattagaggaaaatgttgttattaggttttttttttttgataatatgatgttgaagaattttggggaaattttagtagtgttaattatttgaaaatgttgtaattttattgtttttaaagagtgattttttaaatgattaaaaaaaattttttttttgagatatagtgttattttgttgtttaggttggagtgtagtggtgtgattttagtttattgtaatttttattttttggatttaagtgattttttagttttagtttttttagtagttggggttataggtgtaggttattatgtttggttggtttttgtatttttggtagagatagagttttgttatgttggttaggttgattttaaatttttgagtttaggtgatttgtttattttagttttttaaagtgttgggattataagtgtgagttattgtgtttagattaaaagattaaatatttatatttaatattgataaaattttatttggttaggaattgagttttagtagattttgtttttttatttggttgaatgtgtttatttgaggtgttagttaatttttggatattaattttaggttagtgtgttttttttttgttgagtataggattgttttttttgtgtttaattttagtagttattttattagtgttttttttgttaagtgtttttgagatttgtgataatttggaagttagtagtttttagttgtagttatagtaggggtttgattttgttaggtgttagggaatagatttagttgtgagttttttttagtggagttttgtgtataatatttagtatgaggttttgttggtgttggtgtttaataagtgatttttttattataggaggtatttaagaagttggatttttgtttagtatgttgattatagagtataatagatatttagtgaaaggatggggaaagaattagaattaattttgaagtattttttaagataaagtgtatgaatatttatttagtttttttagtgttaggtagtagaaatatagaaatgagatattttgtttttagaattttgtagttaattgaaaagttgatttttagttatttgtaattattaaagtgttatgattaggtagatgttatagaagatagaggatttttatgtttagtttttatgaagaaggagttattttaagaaagttatttagtaaagatgatttttgataaatgagtgaaaatgggatatattttgaggtgtattttaaggtatttagtatgattagaatatgggagtttagagtggaggaagattatagatagttttgaaatttgttggaattttatttttagtgttgtgatgattagttgtaggttttaatatggtgattagggatttgggtagaggagttagttggaaggttgatatattttaatttgtattttagtaagtttttttggttatagtttgggggataaattggaggggaaggaagataatgtttaaggagagtaattaggtttttgtgttaatttgagtgagaaatgagggtttggatgaaagatgtggttttggggattaggaggagtgatgatttaagtattgagttagtatgattgattaggtgtagggtttaaggaagtgtttaggatgttttaggtatttgatttgtgtttgtttgggagggagtattggggaggtgaagtgtgtgtggaggatttagtgggagagggtttttgggttgttgttgggtatttaggtttgtagtttgttagagttatttggattagaataaaattgggagatgttagtatgtagatgttagttaaggttttgtaggttaatgttagtagttgattataagagtaggatgaaattttggaagtttatttttaaaaattttataagtaatatatgagtatgtttttatgggatatttaaattatttattgtttttaggttttatttttttgtgttgtagttgttgttgatttttgtagag

SEQ ID NO: 212 - DNA, 2501 bp, Artificial Sequence
  chemically treated genomic DNA (Homo sapiens)
aatatatatataaatatgtattatggttttaattgggggagtaagtttttgtggttgtgatttttgagtaaatatttgtttgttttagtggtatagttgagttgattgttgtttggaaaagggtaagttattttgggaattaaatatataaggtgagagtagttagtgttgtagttgttggtaaggtttttgttgataataatagaagtatattttttagaattggttattttgaaggtttaaaatagaatggaagtgattttatttatttaataattaaataaaattttagaaaagattaaatatgaaatgagtaagattttttataaaatattatttaaaaaaaattttttaaatagtatttatttatttatgggttgttttttatttttttattttttttattttttagttttatgatttaattttaaattagtaatatatagtatttagataagttatatttttttatttatagatagaagtaattatgaagtattataagggatttgtaattattaaagaagatgtagataaaataaattatttttaagttatggaaatttttattaaggaattttattagattaataagaaaaatttttatatttattaatatagttattttataaggatattttttaaatgttatttgatattatttttgttaatatttttaatgataattttgatgagttttaattttggattttttatggttattgttttttgtgatttaagaaatttttggttaattttttaagttataaaaatattatttgtttttagttaaaaagttttatatttttaaaatattatatttaggtttatgatttattttaaagttatttttgtgaggtagggggttattgtttatttttttttatatggatatttagttattttattttggttttatttgttgaaaagattttttttttttgttgaattgttttgttatttttgttgaaattaagtgattatataaatgttgatttgtttttaggtttttttttttgttttattgttttatttgttaattttagtgttagtattatattgtattgattattaaatataatttattataataatttttatattgtttaataaaatttaagttttaataggaaagaatatataaattaagttgaaataaatgaatgagattaagatgagttttttttaaaaatttatttttaaaaattatattatggttttgaaaatattttataattattattgtattaatagtaaaatatatttatttataaataattgagagattatatattttttattatttttaattgaaattatgtatgaaaaatattttatttgtttttttattaattttttattaggtttttttttattagttttaagttatttaatattataattattaagtttaaaaataatttttaaaaatgtgttgaagttggaagatgggtatatattttttttaataaaataaattatgttaaattgattttataataaataataaaatgttaaagttatgtattaattttagaaatatttttgataaagaaaaaagtaggttattttttttaaaaaagaaagttttataaagttttttttaaagtttgatttgtaaaggaagattagaagtagaagattattataaagtaatttttaaattaatttttaaaaattaattgtgagtaaattatatatggtttttgaaaattgtaggttgtatgaaatttatttaaattggtatagaaagatttttattattattattatttttttaaaaaagtagataatatgaattgttagatttttagtttttttatatatagtttataagtttgaaataatattttattgagagtaatattaatattttttaagatttataatttttttttaatttgaaattttgttttgaagtataatatttagatttttttgaaataattttttaatatataaataaataattttaaatatttgaagaaaatttattaaaataaaattgagatgtttattatttttttattgatagtagtgaaaattattggaaattatatttttgttttttttaaatgatttatattaaaattatatttttttaaataattggtatagtagataaaatttagttttaaaatttttaaaatatttagatattaaagatagaaatattgattttttttttgttaatgatgagaagaaataagataattagtttaattaagatttgataattgtaaattttaagtatttaaattatagataaggaatattgtttgtgtattttttagttttatatggtagttagataattagaaaattaatagttgttagatttaatgttaaataatggaatttgggaaagtatttttaatattatttttatttaatatgtattatatgtatatgatgtaggtagggaagaagtttatgaatttatgtattaaagataagataggttggtattattgttaaatgtgtattgagttaattaggat

SEQ ID NO: 213 - DNA, 2501 bp, Artificial Sequence
  chemically treated genomic DNA (Homo sapiens)
attttaattggtttagtgtatgtttggtaatagtgttagtttgttttgtttttaatgtatggatttataaattttttttttatttgtattatgtgtatgtagtgtatattaaatgaaagtgatattaagaatgtttttttaaattttattatttgatattgagtttgataattgttagttttttggttgtttaattattatatgaagttagaaaatgtataaatgatattttttatttgtaatttaaatatttaaaatttgtaattgttagattttgattaaattggttgttttatttttttttattattaatggaaaaaaaattagtatttttatttttgatatttaagtgttttgaggattttaaaattgaattttatttgttatattagttatttgagaaagtatgattttaatgtaaattatttaaaaaggataaaagtataatttttagtgatttttattgttgttagtagaaaagtaataaatattttaattttattttagtaaattttttttaagtgtttggggttatttgtttatgtattagagaattgttttaggaaggtttgagtattatgttttaaagtaaaattttaggttaagaagaaattgtaaattttaaagaatgttggtgttatttttaatggaatattgttttaagtttgtaagttgtgtataaaaaaattggaggtttgatagtttatgttatttgtttttttaaaaagatggtagtggtgatgggggtttttttatgttaatttgaataaattttgtatagtttgtagtttttaagagttatatgtaatttgtttataattgatttttaaaaattgatttgggagttgttttgtaataattttttgtttttaatttttttttgtaagttagattttaaagaagattttataaagtttttttttttaaaggaagtaatttatttttttttttattaagaatatttttgaggttgatatatgattttaatattttattatttattgtaaaattaatttagtataatttattttattagggagaatgtgtatttattttttagttttagtatatttttaaggattgtttttaagtttagtaattgtggtattaaatgatttagaattaatggagaaaaatttgataggaaattgatagaaaaatgaatgaaatattttttatatataattttagttggaggtaatggaaaatatgtagttttttagttatttgtgggtaaatatgttttgttgttgatatagtaataattatggagtgtttttaaagttatgatataatttttaaaaatagatttttaaggaaggtttattttgattttatttgtttattttagtttaatttatatatttttttttattgaggtttaaattttgttaagtaatgtgaggattattgtggtaagttgtatttagtaattaatatagtgtgatattggtattaggattgataaataaagtaatggaatagaagagagagtttgaaaatagattaatgtttatatgattatttgattttgataaaggtggtaaaataatttaatagagaaggaaagtttttttaataaatggagttagaatagaatagttgaatatttatatagaaaaaagtgaataatgattttttattttataaaaatgattttgagatgaattatagatttaaatgtaatattttaaaagtatgaagttttttaattgaaaatagatgatatttttgtgatttggggggttagttaaaggttttttaggttatagaaagtagtaattataaaagatttaaaattagagtttattagaattgttattgaaagtgttaataaaagtaatattaaatgatatttgaaaaatatttttgtaaaatgattatattaataggtataaggattttttttattaatttaataaaattttttaataggaatttttatagtttaagagtggtttattttatttgtattttttttggtgattgtaaattttttgtgatattttatgattatttttgtttgtgaataaagaagtgtgatttgtttgggtgttatatgttgttggtttgaaattaagttatgaagttagagggtagagaaaatggaagaataaagagtaatttataaatagataaatgttatttggaaagttttttttaaatgatattttatagaaaattttgtttattttatatttagttttttttaaaattttatttaattattgggtaggtgaagttgtttttattttattttaagtttttaaaatagttaattttaagggatgtatttttgttattattaataaaaattttgttaatagttgtggtattggttatttttattttatatgtttagtttttaagatagtttgtttttttttgaatagtagttagtttgattgtgttattaaaatagataaatatttgtttgggaattataattatggggatttgtttttttagttaggattatggtatatatttgtgtgtatatt

SEQ ID NO: 214 - DNA, 4001 bp, Artificial Sequence
  chemically treated genomic DNA (Homo sapiens)
atgaagtgttatatagagttttaatagttataatatgagtacgttattattaaatataagttaattaattaatgtttttttaattatgaaagtggttttttatttgtaaatgatcgtattttatagttatatgaattagaagaaaatggaaattttatagaatgggaattaaattaatatttgtgattagttttattttagtttgagatttataaatagtttttttaagtttatagttttaatgtgtagagtaaagtaaagattatgaattgattatttggaaaattattttttattgaaataatgtgtttttttttttttttttatgaaatagagatgagagtatattattgttatgaagaataaatgaaattaaagtttaaaacgtgtttattatttagtaataagtatttaataagtgttataattattatttagtttagatataaataattatttttatttatgttagaaatttattgtggtttaatttttttgtttatatgttgtagatgtaatttgatagtataatgtaaattaaatgtaacgtttatttttttaaataaaggtatagaatattacgttaatgaaagaattattttaaaaatgatgatatggtatatattgataattgaagtagagagaaataaggatgatgagggtatgataattttaaaatataatttgaatattaaacggttttaattttatttttaatatatatttttaagaattttttgatggagtatattgaacgttttggttttatttattagtaatattttttttttttatttggagaatttttttttattttttttatagttttagtttacgttattttttgtagttttttttaaaatttttaggtaaaattatttttttatgattttaaagtattgagttgataatgttagtaaagtaatttatatattgtattatagttaagttttataagcgtgttttttttagtagttttttaagttcgatattggtatttagggttatagttcgtgatattgaaggtatataagatgtttgatgaattgaagtggattttggaattttagggttgggaagggttaaaggggtcgttaatatttgttttcggatgtaaaagtgcgatattaagaagattaagcgagttgtttaaattatagatagtgattgtgaaagaacgaatatttaagtttttttttttaataaaatttatgaggataagattgtgtgtttggttgattgtttttaattggtttatttaataaagaatcggagtgtgtaatatatttttaattaagtgttttttattataaaataatataaatgttaatttataaacgttggaaatatataaattttaaagttaaattttgcgtcggttttgtattaatttttaattataaaaattttgagaaataggtaaaattattttgtacggtaatacgttatatgaaaatagtatttgtaaaatatttaattttttttggtattaagatatttaaagtgaaatttgtttttaggtttatagatttatagaagtttatttatatagagtgagtaaggtaattaaagcggatatatagtatatatttaaaaaatttatttatatagtgtaggttatgttaaacgttaataaaatgtaagtgataatttgtttttgtgggaattagatataaagatttatattttgaggaagtttaagtttatcggttaatagttatattacgatttgttgtcgttatagacgggttttaaggagaagtattgtttttagtaagttaaatatttggattttattaatggcgagataaaagaggtaaggtgcgtttaatgtataaatgttaaagtaaataattagttttttttgcgatcgttaggattagaagatagtttgagtttttttaggaaatttatgtaagtaggtttttagaattcgttgataaatattgtagtcgaaggcgggtatgaggttaagaaaggttaaggaattattgcgatttttttaggagggcgtggggacggtcgagtataattaggtataaaggtagaaacgtaatatttgggcgggtttcggcgttattttcgagttttagggtttttacgcgtttcgggggttagacgtttagatttaggattatcggttttttcgtggtaggtaggtgatcgattttatttaaaggaggtcgtaggtttttatggattttaaagtttatatgttaagttaattttatagagaggtcgtttcgttttttagtaacggtcgtagttaagagtcgtcgtttatttcggttcggattagtttgttcgcggttttttttttgttgttttttatttcgtaggttaaatcgggttggttttaatttcgaacggtttgtggggttttttttttattcgttggagtgcggggcggtgggagagagtaggggttataaggagggtcgatttaggtgttattgtttttttagtatttattatggcgattttttagagtttgtagtaagtagtattcgtttcgcgcgtagtttttcgcggttatgtgacgttgcggtttttttaagtttcgttttttttagtttcgttttcgggttttataggcggtttattgattggtttatttttaggaattcgagtttcgcgtgtttattggttttgttatttaacgttagatggacggatttgagcgttagttaattttattatagcgtgcgagagtgggcggagtagtgtagggtagtggggatcgttcggcggtaggtaggagataataggagggaaaggtagtgtgtgatgagtttgttaagaaggaatggaaggagggggagtcgataagtttacgtttatcgtatttgcgttggcgattgcgttattgatgcgtatgcgtaaaaggaagattttgattggtttgtgggacggttttaacgttttgttttaattaatttagatgcgtcgggggtggggtttggtttttattggtcggtgtagtttttgcgcgcgggtttcgttgattcgcggcgtttacgggaattgttcgttttagtgtcggcgttatggggtcggagttgatcgggcgtttagtttcgcgtttgggtttcgtcgagttcgatatgttgaggtgagttcggtcgcgtaagattagggttgggttttcgtttcgcggttttgggtttttaggtgaggttcgcgttttttttaggcgacgggcggcgggggagtgacggggagcgttggggtcgggcggggtttagggtttattttaagaaaaatttttcggtcgtgagtttgaatgagatggtaagaagggcgatagtaaacggcgatggtatacgtttttgggaatagttagttttgttcgtgggtagaaaaatgagttagggagaatttttcgtttatttcgttaacgtttattgtagtcgggtttatagcggggaattcgataacgaggcgtagatttcgttgtttgtaagggcgaggattgtgtagattttaatcgggtaatgtttttgagttattgggtttggggtggagcgcggtttagcggttgtttttaatataaagaaataaataaaattcggaaaagtaggcgtcgttttcgttgaggtcggattgatggtagatgttaggcgaggaaagatatggtaagagtagtttaggtaggggcgatagtttttgtaaaagcgttgagatgggaagcgggattcggggttcgaaataaagttattgtagttaaaacgtggagtagttaggcgagggaaggtaaggaaaatagtatttaaaagatttgaagataaatttgtaggattcggtagttatttagaatagtggtttttaaaatgtggtttttggattagtaatagttatattattttgttatttgttagaaatataaatttttgggttttattttaagtttgttgattagtaattcggtttgggatttagtaatttgtaagtttttaaggtgattttcgtttattattaagtttaagaattattgatttaaa

SEQ ID NO: 215 - DNA, 4001 bp, Artificial Sequence
  chemically treated genomic DNA (Homo sapiens)
tttaaattagtagtttttaaatttgatggtaggcgaaaattattttggggatttgtaaattattgggttttaggtcgagttattgattagtaggtttgaggtgggatttaagaatttgtatttttaataagtgataagatgatatggttgttgttggtttaggaattatattttgagaattattgttttaaatgattatcgagttttgtaggtttgtttttaaattttttaagtgttgttttttttgttttttttcgtttgattgttttacgttttagttataatggttttatttcgaatttcggatttcgttttttattttaacgtttttataggagttgtcgtttttgtttgggttgtttttgttatattttttttcgtttagtatttgttattaattcggttttagcgggaacggcgtttgttttttcgagttttgtttgtttttttgtgttaaaggtagtcgttaggtcgcgttttattttaagtttagtggtttaggagtattgttcggttaaggtttatatagttttcgtttttatagatagcggggtttgcgtttcgttgtcgggtttttcgttataaattcgattgtagtaggcgttggcggaatgaacggaaagttttttttggtttatttttttatttacggatagggttggttgtttttagggacgtgtgttatcgtcgtttgttatcgttttttttgttattttatttaagtttacggtcgagaagttttttttgaagtaggttttaaatttcgttcggttttagcgtttttcgttattttttcgtcgttcgtcgtttgggaagggcgcgggttttatttgagggtttagggtcgcgaggcggaagtttagttttggttttgcgcggtcgaatttattttagtatgtcgggttcggcgaggtttaggcgcggggttaggcgttcgattagtttcgattttatggcgtcggtattaaagcgaataattttcgtgaacgtcgcgggttaacgaaattcgcgcgtaaaggttgtatcggttagtgagagttaggttttattttcggcgtatttggattggttaggataggacgttgagatcgttttataaattaattagggttttttttttgcgtatgcgtattaatagcgtaatcgttaacgtagatgcggtgaacgtggatttgtcggttttttttttttttatttttttttgataaatttattatatattgttttttttttttgttgttttttgtttgtcgtcgggcgatttttattgttttgtattgtttcgtttattttcgtacgttgtggtgagattggttggcgtttaggttcgtttatttagcgttaagtgatagggttaataagtacgcgagattcgggtttttagaagtaggttaattaatgagtcgtttgtagggttcgggggcggggttagagagggcggggtttggaggggtcgtagcgttatatgatcgcgggaggttacgcgcggggcgggtgttgtttgttgtaggttttggggagtcgttatggtgagtgttgagggggtagtggtatttgggtcgattttttttgtagtttttgtttttttttatcgtttcgtattttagcgagtggagaaggggttttatagatcgttcgggattaagattagttcgatttggtttgcgggataggggatagtaggaggaaggtcgcgggtaggttgattcgggtcggggtgggcggcggtttttggttgcggtcgttgttgagagacggggcggtttttttgtggggttgatttggtatgtaggttttggggtttatgaaggtttgcggttttttttaagtggaatcggttatttgtttattacgaggggatcggtagttttaggtttgagcgtttggttttcggggcgcgtggaggttttgagattcggaggtggcgtcgggattcgtttagatgttgcgtttttatttttgtgtttagttgtgttcggtcgtttttacgtttttttggaggggtcgtagtgattttttggttttttttggttttatattcgttttcggttgtagtgtttgttagcgagttttggggatttgtttatatgaattttttggaaggatttaggttgttttttaattttgacggtcgtaaaggagattgattgtttattttagtatttgtgtattgggcgtattttgttttttttgtttcgttattgataaaatttaagtatttgatttgttggaagtagtatttttttttagggttcgtttatgacggtagtaaatcgtggtgtggttgttggtcggtaaatttgaatttttttaaaatgtgaatttttgtgtttggtttttataaaggtaagttgttatttgtattttattagcgtttaatatagtttgtattgtgtaaataaattttttgagtatatattgtatgttcgttttaattattttatttattttgtgtagataggtttttgtaaatttgtaagtttggaaatagattttattttaaatgttttaatgttagaaaggattaagtgttttataaatattatttttatataacgtgttgtcgtataaggtgattttgtttgttttttaggatttttataattgggaattgatataagatcggcgtaaaatttaattttaggatttgtgtgtttttagcgtttatggattgatatttatattgttttgtaatggaaaatatttaattgaggatgtattatatatttcgattttttgttgggtgaattagttgggagtaattagttagatatatagttttgtttttatgaattttattgggaaaggaaatttgagtattcgtttttttatagttattgtttataatttaggtagttcgtttagtttttttggtgtcgtatttttgtattcgaaagtaagtgttggcggtttttttggttttttttagttttaaaattttagaatttattttaatttattaaatattttgtgtgtttttagtgttacggattgtggttttgggtattaatgtcgaatttaagaggttattgggggagatacgtttgtagaatttaattgtaatatagtgtgtggattgttttattaatattgttaatttagtgttttggggttatggagggatagttttgtttggggattttgggaaggattataggaagtaacgtgaattgagattataaagagggtggaaagaaattttttaggtggaaagaaaaggtattgttaatagatgaagttaaaacgtttagtgtgttttattagaggatttttggggatatgtattggaaatgaagttagagtcgtttggtgtttaaattatattttgaagttgttatgtttttattatttttatttttttttattttagttgttaatgtatgttatgttattatttttaaaatagtttttttattaacgtgatattttgtatttttgtttgaagaaatgagcgttatatttggtttatattgtattgttagattatatttatagtatataagtagggaggttgaattataataggtttttaatataagtggagataattatttgtatttaaattgaataataattatagtatttattaagtgtttattgttaagtagtaggtacgttttgagttttggttttatttgttttttataatagtggtgtatttttatttttgttttatagaagaggaaagaaaagtatattgttttagtggagagtagttttttaagtgattagtttatgatttttgttttgttttgtatattagaattgtagatttgagagggttgtttgtgggttttaagttaaaatgggattaattataaatgttaatttgatttttattttgtagggtttttatttttttttgatttatgtagttgtgaagtacggttatttataaatggaaaattatttttatgattgaggaaatattggttaattggtttgtgtttaatgatagcgtgtttatattataattgttaaggttttatgtgatattttat

SEQ ID NO: 216 - DNA, 4001 bp, Artificial Sequence
  chemically treated genomic DNA (Homo sapiens)
atttttttatatttattgtttattattttgttttagataattgtatgtaaaggaggtttttattttagggtttttgtatttgttgtttttttatttgattgaggaggttttttttgtttatattttataaaataagaaattaattttagttttagattagttttttttagttttttttattgttttatttttttttataatatgtattattaattgttacgtttgttatatttgcggagtgtttgtatttgttgtttagaatgtaagttttataggggtaggagttttgttttattaattgttatgtttttagtataaagttcgattaaataagttatgtgtttgagtgtgtatgttgaggtgggggagatattttagaaatagtattttttggagtttgggaacgaaaaaaagagttggaatttgtagttttttgatttttagtttataaaatagaaatattttaataggtataagatgaaatgatttaatatttaaaatatttaattatattttatacgaaattggttatttttataatttaattttttaatagttttaaaagttattatagatgagatgaaaaagaataagttatttttttgagtttgagatttatttgtaaaatatttacgttaggtattgttgggaggagtgtaaatgattatttattttgtgtttaagattgatatttgattttttttttatagatataaaatatttttattttaatttttttttaaaaaggaaaaattgtggttttttttttataattgtaaaatttgaggaattaaattattttagatttttttttagtgttttatttttatttttgttttataattattattttattgttagtatgagataagtttagttgtattagaatggtagaaaatgtttttagaattcgtagggatattagatattattttgatttgtaatttttattgaggaataagaaagaaatgtattagaatgaggaggaaagtgtttgaaaaatatatttaaggtcgggcgcggtggtttatgtttgtaaattttagtattttggaaggtcgaggcggacggattatttgaggttaggagttggagattagtttggttaatatggtgaaatttcgtttatattaaaaatataaaaattagtcgggcgtggtggcgggcgtttgtaattttagttattcgggaggttgaggtaggagaatcgtttgaattcgggaggcggaggttgtagtgagtcgagatggcgttattgtattttagtttgggtaatagagtaatattttgtttttaaaaaaaaagagaaaaatatatttagtattatattttttttttttagaggagaaaatttttaaagatttggtaagagaaggaaaagtttaatataatttttttggttgatgggggtgtattaaagatattgagatttaattaaaggaatattttattagggggttgtgaaatttttgtgtttattaaaataaggtaaaagtttttttaagagtttgagaaatttttatttagattaatttattaaaaatatttatagtttaaaaaataaatagaaaaagagttttaaaaaagttaatagatatgtttaatttagaaaattgggaagtggtttaaatttttttgagttttagtttagttttttaatattatatattggttacgattaattaagatttaattgtatattagttgtcgaaatgtttttcgtataataaaaatttttaatatgaaataaaggttttatattattagtcgagttttttattaataaattttcgattttgttttttatatttatatttaagaagggaggtatatttttttagtatttattaaatgttttttttgtatattattaagttatttaatataattttgtcggtttaatggtattgtatttattttgtagacgataagtcgaggttagatgaagttaattataaaattagcggtattgaaatttaatttagtgtaattttaaagttttttttatattaagttgttttttgtacggtaatagaatttttggaatttgttcgtagagaatgagtagggtttttgtttttttatggttttggttaggtttagtttgttttgtaattcgtaggtaatagagttatggaaattaaatgaatcgttgttaagtcggtgtaagattattatttagtatattttatgaagatttggttttaattgaatagattgaaaattaattttataatttttttgtagtgttttttagaaattagttattgttattgtttagaaaatcgggggattgtttttttaagtggttaaaacgggttttttattagagttcgttatttgtttagtcggtataaggttagttatataattttgtaaatttttcgtaatttttcgaaggggttaaagtttacgttttagtaaaagtataggcgtttttcgtttagcgaagatatgcgtatgcgtttattcgtttttttttaaagtaattattatttggtggcgttatttttttttacgtttgttttatttatttagttttttttttcgaatatttttgtttaattttataagggtagagttggtatttagtttttgttcgttatagtcggtatttgttaggaaagatttagttgagtttgacgttatgattcgaatagttattcgattagtttagttagaaagtttgtaaattttattttaggatcgttattttttttcgtcgtttttttgttggtttttttttcgcgcgttgttaagttttgttacgtatgcgttttggttatttcgcggtttgttcgcgtttttgttattttttgcgtaggcgtttaaggagtttttggattttaggttttcgcggttgggagaaaaggaggcggggattcgaagggggaaatgattttgaggcgttcggacgtcgttcggaagttaattagagagcgtgacgttagtttggcgcggagtttggcggtcggggtttatagtggcgggagttggaggcgataacgatttgtgttgtgagaggcgtaagttgcgatttttgttgaatttggaggtatttttacgattttttttttagttgaggtttttttttcgattttgatgttttttaattcggtgtttcgttagttttagtttggcgttttgagaaatggtgagtaacggttttaatcgttgttcggagttggcggaatttatttttttcgaaatatacgttattttcgattagggtcgattttaattttgaatttagtttttgagtttttttatggtaagggtaaattagtgttagtagggattattaaagaaagttgtatttttattttttcgggatatttgtaatcgtaatcgggtttttaaaatcgtaacgtaggtagggacgtcgaaataattgttttttaaggttttttatagtttatatttttattgcgcgttaacgggaaaatgtatgtatttgtgtgtatatgttttttttaacggttatttgagatgtttaaaatttttaattattgattaatttattcgtttgttgtagaattttagtgagtttagttatgtgttataggtatatattagtgaatatgattcgttgttaaggaatttagttaagtagagaagataggatatttgtttttaataggaataaaattttatttttttcgtttattatacggttataaaaatttaaattatagagtgaaagatgtttgtaattatattcgttagagatgatttttgttaatagattgaagtatattattttagatgttttcgacgttagaggtaatatttattatttttagaaatcggattaaaacgtttagtttttttattttaatggtataagttgaacgtatttttatgttaatacgtagaaatttaatttatttttttacgttaaaatattggtaataagagatttgaggttagatttggatgttattaatttaaattttttggtaagttttagataagggagttaattatttagattaattttg

SEQ ID NO: 217 - DNA, 4001 bp, Artificial Sequence
  chemically treated genomic DNA (Homo sapiens)
taaggttaatttgggtagttagtttttttatttgaaatttattaaaaagtttaagttgatgatatttaaatttaattttaaattttttattgttaatgttttagcgtaagaaaataagttagatttttacgtattaatatgggaatacgtttaatttatattattaaagtgaaaaaattggacgttttgattcgatttttgaaaataataggtattatttttagcgtcgaaaatatttggaataatatattttaatttattaataggggttatttttggcggatgtggttataggtattttttattttataatttaaatttttatgatcgtgtagtaaacggggaaaataagattttgtttttgttagaagtagatattttgttttttttgtttgattgagttttttaatagcgggttatatttattggtatatatttatagtatatagttgggtttattaagattttataataaacgaatgaattaattaatgattaggagttttgagtattttaaataatcgttgaaggaaatatatatatataaatgtatgtattttttcgttaacgcgtaatggagatgtaagttgtaaggggttttggaaggtagttatttcgacgtttttgtttacgttacgattttaaaagttcgattacgattataagtgtttcgaggggatgaaagtatagttttttttagtagtttttgttaatattaatttatttttgttatgggagaatttagaagttgagtttagaattggagtcggttttggtcggaggtggcgtgtgtttcgggggaaatgaatttcgttagtttcgagtagcggttgggatcgttatttattattttttaggacgttaagttggggttggcggagtatcgaattgaagagtattagggtcggaggaaaagttttagttgagagaaaagtcgtagaaatgtttttaagtttagtagaaatcgtagtttgcgttttttataatataaatcgttatcgtttttaattttcgttattgtaagtttcggtcgttaaatttcgcgttaaattgacgttacgttttttgattggttttcgagcgacgttcgggcgttttagagttattttttttttcggattttcgttttttttttttttagtcgcgggaatttggagtttaagagttttttgagcgtttgcgtagggggtagtagaggcgcggataaatcgcggggtgattagggcgtatgcgtaatagggtttgatagcgcgcggaagaaaaattagtaagaaggcggcgggggaagatggcggttttggggtagagtttgtaagttttttgattaggttagtcgagtaattattcgggttatggcgttaaatttaattaagttttttttggtagatgtcggttatggcgaataggaattggatgttaattttgtttttatggaattggataaaggtattcgaaagagagggttgaatgggtgaaataggcgtggggggaagtggcgttattaggtggtggttgttttgggagaagacggataggcgtatgcgtatgttttcgttgggcggggagcgtttgtgtttttgttggggcgtgggttttgattttttcgggaggttgcgggaaatttgtaggattgtgtgattggttttatatcggttaaataagtagcgagttttagtgagaggttcgttttgattatttgagggagtagtttttcgattttttaagtagtgatagtggttagtttttaagagatattgtaaagaaattgtgaaattggtttttagtttgtttagttgagattaggtttttatgaaatgtgttgaatagtaattttgtatcgatttgatagcgatttatttgatttttatagttttgttatttgcgggttataaggtaggttaaatttggttaagattataaaaaagtaagggttttgtttattttttgcggataagttttaggagttttgttgtcgtatagggagtagtttggtgtagagggagttttggggttatattgagttaagttttaatgtcgttgattttatgattaattttatttagtttcggtttgtcgtttgtaaagtgggtatagtattattgagtcggtagaattgtattaagtgatttaatggtatgtaaaagaagtatttagtaaatgttgaagagatatatttttttttttagatgtggatatgggaggtaaggtcggaaatttgttagtaaagaattcgattagtaatatgaaatttttattttatattgaggatttttattgtacgggaaatatttcggtagttggtatataattaaattttgattaatcgtagttaatatataatgttggagaattggattagaatttagaagggtttgagttattttttagttttttgagttggatatgtttattaatttttttgggattttttttttgtttattttttaaattgtgaatatttttagtgggttagtttaaataagagttttttaggtttttaaaaaagtttttattttattttgataaatataaaaattttatagttttttaatgggatatttttttggttgagttttagtatttttagtgtatttttattaattaagaaaattatgttgaattttttttttttttattaaatttttaggggtttttttttttgaaaaaaaaaagtataatattaaatgtgtttttttttttttttttggagatagagtgttgttttgttgtttaggttagagtgtagtggcgttatttcggtttattgtaattttcgtttttcgagtttaaacggtttttttgttttagtttttcgagtagttggaattataggcgttcgttattacgttcggttaatttttgtatttttagtatagacggggttttattatgttggttaggttggtttttaatttttgattttaggtgattcgttcgtttcggttttttaaagtgttgggatttataggtatgagttatcgcgttcggttttaaatgtgttttttaaatatttttttttttattttgatatattttttttttattttttagtgaaagttataggttaggataatatttaatatttttacgagttttaaggatattttttattattttggtgtagttgagtttgttttatgttgataataggatagtggttgtggaatagggataaagatggggtattgaagaggagtttagaatggtttaattttttaaattttgtagttgtaagaaaaaaattataattttttttttttaaagaagagttgaaatgaaaatattttatatttataggaaagaaattaggtgttaattttagatatagagtaagtgattatttgtattttttttagtaatgtttggcgtgagtgttttataggtgaattttaggtttagaaagatgatttgtttttttttattttatttgtagtaatttttaaagttgttaggaaattaagttatagaaatagttagtttcgtgtagaatatagttgagtattttaaatattgagttattttattttgtatttgttaaagtatttttgttttgtgagttaaaggttagaaggttataagttttaattttttttttcgtttttaaattttaaggaatattgtttttgaaatattttttttattttagtatatatatttagatatatgatttatttgatcgggttttgtattaggaatatggtagttaatgagataaaatttttgtttttatagagtttatattttagatagtagatgtagatatttcgtaaatatagtaaacgtgatagttagtgatatatattataaaggaaaatgaagtaatgaaagggattggagaaaattgatttggggttggagttgattttttattttatgaagtataggtaagaaagatttttttaattaagtggaagaatagtaagtataaaggttttgaggtagaagttttttttgtatgtagttatttggagtaaagtaataggtaatgagtatagaaagat

SEQ ID NO: 218 - DNA, 4001 bp, Artificial Sequence
  chemically treated genomic DNA (Homo sapiens)
atgaagtgttatatagagttttaatagttataatatgagtatgttattattaaatataagttaattaattaatgtttttttaattatgaaagtggttttttatttgtaaatgattgtattttatagttatatgaattagaagaaaatggaaattttatagaatgggaattaaattaatatttgtgattagttttattttagtttgagatttataaatagtttttttaagtttatagttttaatgtgtagagtaaagtaaagattatgaattgattatttggaaaattattttttattgaaataatgtgtttttttttttttttttatgaaatagagatgagagtatattattgttatgaagaataaatgaaattaaagtttaaaatgtgtttattatttagtaataagtatttaataagtgttataattattatttagtttagatataaataattatttttatttatgttagaaatttattgtggtttaatttttttgtttatatgttgtagatgtaatttgatagtataatgtaaattaaatgtaatgtttatttttttaaataaaggtatagaatattatgttaatgaaagaattattttaaaaatgatgatatggtatatattgataattgaagtagagagaaataaggatgatgagggtatgataattttaaaatataatttgaatattaaatggttttaattttatttttaatatatatttttaagaattttttgatggagtatattgaatgttttggttttatttattagtaatattttttttttttatttggagaatttttttttattttttttatagttttagtttatgttattttttgtagttttttttaaaatttttaggtaaaattatttttttatgattttaaagtattgagttgataatgttagtaaagtaatttatatattgtattatagttaagttttataagtgtgttttttttagtagttttttaagtttgatattggtatttagggttatagtttgtgatattgaaggtatataagatgtttgatgaattgaagtggattttggaattttagggttgggaagggttaaaggggttgttaatatttgtttttggatgtaaaagtgtgatattaagaagattaagtgagttgtttaaattatagatagtgattgtgaaagaatgaatatttaagtttttttttttaataaaatttatgaggataagattgtgtgtttggttgattgtttttaattggtttatttaataaagaattggagtgtgtaatatatttttaattaagtgttttttattataaaataatataaatgttaatttataaatgttggaaatatataaattttaaagttaaattttgtgttggttttgtattaatttttaattataaaaattttgagaaataggtaaaattattttgtatggtaatatgttatatgaaaatagtatttgtaaaatatttaattttttttggtattaagatatttaaagtgaaatttgtttttaggtttatagatttatagaagtttatttatatagagtgagtaaggtaattaaagtggatatatagtatatatttaaaaaatttatttatatagtgtaggttatgttaaatgttaataaaatgtaagtgataatttgtttttgtgggaattagatataaagatttatattttgaggaagtttaagtttattggttaatagttatattatgatttgttgttgttatagatgggttttaaggagaagtattgtttttagtaagttaaatatttggattttattaatggtgagataaaagaggtaaggtgtgtttaatgtataaatgttaaagtaaataattagttttttttgtgattgttaggattagaagatagtttgagtttttttaggaaatttatgtaagtaggtttttagaatttgttgataaatattgtagttgaaggtgggtatgaggttaagaaaggttaaggaattattgtgatttttttaggagggtgtggggatggttgagtataattaggtataaaggtagaaatgtaatatttgggtgggttttggtgttatttttgagttttagggtttttatgtgttttgggggttagatgtttagatttaggattattggtttttttgtggtaggtaggtgattgattttatttaaaggaggttgtaggtttttatggattttaaagtttatatgttaagttaattttatagagaggttgttttgttttttagtaatggttgtagttaagagttgttgtttattttggtttggattagtttgtttgtggttttttttttgttgttttttattttgtaggttaaattgggttggttttaattttgaatggtttgtggggttttttttttatttgttggagtgtggggtggtgggagagagtaggggttataaggagggttgatttaggtgttattgtttttttagtatttattatggtgattttttagagtttgtagtaagtagtatttgttttgtgtgtagttttttgtggttatgtgatgttgtggtttttttaagttttgttttttttagttttgtttttgggttttataggtggtttattgattggtttatttttaggaatttgagttttgtgtgtttattggttttgttatttaatgttagatggatggatttgagtgttagttaattttattatagtgtgtgagagtgggtggagtagtgtagggtagtggggattgtttggtggtaggtaggagataataggagggaaaggtagtgtgtgatgagtttgttaagaaggaatggaaggagggggagttgataagtttatgtttattgtatttgtgttggtgattgtgttattgatgtgtatgtgtaaaaggaagattttgattggtttgtgggatggttttaatgttttgttttaattaatttagatgtgttgggggtggggtttggtttttattggttggtgtagtttttgtgtgtgggttttgttgatttgtggtgtttatgggaattgtttgttttagtgttggtgttatggggttggagttgattgggtgtttagttttgtgtttgggttttgttgagtttgatatgttgaggtgagtttggttgtgtaagattagggttgggtttttgttttgtggttttgggtttttaggtgaggtttgtgttttttttaggtgatgggtggtgggggagtgatggggagtgttggggttgggtggggtttagggtttattttaagaaaaattttttggttgtgagtttgaatgagatggtaagaagggtgatagtaaatggtgatggtatatgtttttgggaatagttagttttgtttgtgggtagaaaaatgagttagggagaattttttgtttattttgttaatgtttattgtagttgggtttatagtggggaatttgataatgaggtgtagattttgttgtttgtaagggtgaggattgtgtagattttaattgggtaatgtttttgagttattgggtttggggtggagtgtggtttagtggttgtttttaatataaagaaataaataaaatttggaaaagtaggtgttgtttttgttgaggttggattgatggtagatgttaggtgaggaaagatatggtaagagtagtttaggtaggggtgatagtttttgtaaaagtgttgagatgggaagtgggatttggggtttgaaataaagttattgtagttaaaatgtggagtagttaggtgagggaaggtaaggaaaatagtatttaaaagatttgaagataaatttgtaggatttggtagttatttagaatagtggtttttaaaatgtggtttttggattagtaatagttatattattttgttatttgttagaaatataaatttttgggttttattttaagtttgttgattagtaatttggtttgggatttagtaatttgtaagtttttaaggtgatttttgtttattattaagtttaagaattattgatttaaa

SEQ ID NO: 219 - DNA, 4001 bp, Artificial Sequence
  chemically treated genomic DNA (Homo sapiens)
tttaaattagtagtttttaaatttgatggtaggtgaaaattattttggggatttgtaaattattgggttttaggttgagttattgattagtaggtttgaggtgggatttaagaatttgtatttttaataagtgataagatgatatggttgttgttggtttaggaattatattttgagaattattgttttaaatgattattgagttttgtaggtttgtttttaaattttttaagtgttgttttttttgtttttttttgtttgattgttttatgttttagttataatggttttattttgaattttggattttgttttttattttaatgtttttataggagttgttgtttttgtttgggttgtttttgttatatttttttttgtttagtatttgttattaatttggttttagtgggaatggtgtttgtttttttgagttttgtttgtttttttgtgttaaaggtagttgttaggttgtgttttattttaagtttagtggtttaggagtattgtttggttaaggtttatatagtttttgtttttatagatagtggggtttgtgttttgttgttgggttttttgttataaatttgattgtagtaggtgttggtggaatgaatggaaagttttttttggtttatttttttatttatggatagggttggttgtttttagggatgtgtgttattgttgtttgttattgttttttttgttattttatttaagtttatggttgagaagttttttttgaagtaggttttaaattttgtttggttttagtgttttttgttatttttttgttgtttgttgtttgggaagggtgtgggttttatttgagggtttagggttgtgaggtggaagtttagttttggttttgtgtggttgaatttattttagtatgttgggtttggtgaggtttaggtgtggggttaggtgtttgattagttttgattttatggtgttggtattaaagtgaataatttttgtgaatgttgtgggttaatgaaatttgtgtgtaaaggttgtattggttagtgagagttaggttttatttttggtgtatttggattggttaggataggatgttgagattgttttataaattaattagggttttttttttgtgtatgtgtattaatagtgtaattgttaatgtagatgtggtgaatgtggatttgttggttttttttttttttatttttttttgataaatttattatatattgttttttttttttgttgttttttgtttgttgttgggtgatttttattgttttgtattgttttgtttatttttgtatgttgtggtgagattggttggtgtttaggtttgtttatttagtgttaagtgatagggttaataagtatgtgagatttgggtttttagaagtaggttaattaatgagttgtttgtagggtttgggggtggggttagagagggtggggtttggaggggttgtagtgttatatgattgtgggaggttatgtgtggggtgggtgttgtttgttgtaggttttggggagttgttatggtgagtgttgagggggtagtggtatttgggttgattttttttgtagtttttgtttttttttattgttttgtattttagtgagtggagaaggggttttatagattgtttgggattaagattagtttgatttggtttgtgggataggggatagtaggaggaaggttgtgggtaggttgatttgggttggggtgggtggtggtttttggttgtggttgttgttgagagatggggtggtttttttgtggggttgatttggtatgtaggttttggggtttatgaaggtttgtggttttttttaagtggaattggttatttgtttattatgaggggattggtagttttaggtttgagtgtttggtttttggggtgtgtggaggttttgagatttggaggtggtgttgggatttgtttagatgttgtgtttttatttttgtgtttagttgtgtttggttgtttttatgtttttttggaggggttgtagtgattttttggttttttttggttttatatttgtttttggttgtagtgtttgttagtgagttttggggatttgtttatatgaattttttggaaggatttaggttgttttttaattttgatggttgtaaaggagattgattgtttattttagtatttgtgtattgggtgtattttgttttttttgttttgttattgataaaatttaagtatttgatttgttggaagtagtatttttttttagggtttgtttatgatggtagtaaattgtggtgtggttgttggttggtaaatttgaatttttttaaaatgtgaatttttgtgtttggtttttataaaggtaagttgttatttgtattttattagtgtttaatatagtttgtattgtgtaaataaattttttgagtatatattgtatgtttgttttaattattttatttattttgtgtagataggtttttgtaaatttgtaagtttggaaatagattttattttaaatgttttaatgttagaaaggattaagtgttttataaatattatttttatataatgtgttgttgtataaggtgattttgtttgttttttaggatttttataattgggaattgatataagattggtgtaaaatttaattttaggatttgtgtgtttttagtgtttatggattgatatttatattgttttgtaatggaaaatatttaattgaggatgtattatatattttgattttttgttgggtgaattagttgggagtaattagttagatatatagttttgtttttatgaattttattgggaaaggaaatttgagtatttgtttttttatagttattgtttataatttaggtagtttgtttagtttttttggtgttgtatttttgtatttgaaagtaagtgttggtggtttttttggttttttttagttttaaaattttagaatttattttaatttattaaatattttgtgtgtttttagtgttatggattgtggttttgggtattaatgttgaatttaagaggttattgggggagatatgtttgtagaatttaattgtaatatagtgtgtggattgttttattaatattgttaatttagtgttttggggttatggagggatagttttgtttggggattttgggaaggattataggaagtaatgtgaattgagattataaagagggtggaaagaaattttttaggtggaaagaaaaggtattgttaatagatgaagttaaaatgtttagtgtgttttattagaggatttttggggatatgtattggaaatgaagttagagttgtttggtgtttaaattatattttgaagttgttatgtttttattatttttatttttttttattttagttgttaatgtatgttatgttattatttttaaaatagtttttttattaatgtgatattttgtatttttgtttgaagaaatgagtgttatatttggtttatattgtattgttagattatatttatagtatataagtagggaggttgaattataataggtttttaatataagtggagataattatttgtatttaaattgaataataattatagtatttattaagtgtttattgttaagtagtaggtatgttttgagttttggttttatttgttttttataatagtggtgtatttttatttttgttttatagaagaggaaagaaaagtatattgttttagtggagagtagttttttaagtgattagtttatgatttttgttttgttttgtatattagaattgtagatttgagagggttgtttgtgggttttaagttaaaatgggattaattataaatgttaatttgatttttattttgtagggtttttatttttttttgatttatgtagttgtgaagtatggttatttataaatggaaaattatttttatgattgaggaaatattggttaattggtttgtgtttaatgatagtgtgtttatattataattgttaaggttttatgtgatattttat

SEQ ID NO: 220 - DNA, 4001 bp, Artificial Sequence
  chemically treated genomic DNA (Homo sapiens)
atttttttatatttattgtttattattttgttttagataattgtatgtaaaggaggtttttattttagggtttttgtatttgttgtttttttatttgattgaggaggttttttttgtttatattttataaaataagaaattaattttagttttagattagttttttttagttttttttattgttttatttttttttataatatgtattattaattgttatgtttgttatatttgtggagtgtttgtatttgttgtttagaatgtaagttttataggggtaggagttttgttttattaattgttatgtttttagtataaagtttgattaaataagttatgtgtttgagtgtgtatgttgaggtgggggagatattttagaaatagtattttttggagtttgggaatgaaaaaaagagttggaatttgtagttttttgatttttagtttataaaatagaaatattttaataggtataagatgaaatgatttaatatttaaaatatttaattatattttatatgaaattggttatttttataatttaattttttaatagttttaaaagttattatagatgagatgaaaaagaataagttatttttttgagtttgagatttatttgtaaaatatttatgttaggtattgttgggaggagtgtaaatgattatttattttgtgtttaagattgatatttgattttttttttatagatataaaatatttttattttaatttttttttaaaaaggaaaaattgtggttttttttttataattgtaaaatttgaggaattaaattattttagatttttttttagtgttttatttttatttttgttttataattattattttattgttagtatgagataagtttagttgtattagaatggtagaaaatgtttttagaatttgtagggatattagatattattttgatttgtaatttttattgaggaataagaaagaaatgtattagaatgaggaggaaagtgtttgaaaaatatatttaaggttgggtgtggtggtttatgtttgtaaattttagtattttggaaggttgaggtggatggattatttgaggttaggagttggagattagtttggttaatatggtgaaattttgtttatattaaaaatataaaaattagttgggtgtggtggtgggtgtttgtaattttagttatttgggaggttgaggtaggagaattgtttgaatttgggaggtggaggttgtagtgagttgagatggtgttattgtattttagtttgggtaatagagtaatattttgtttttaaaaaaaaagagaaaaatatatttagtattatattttttttttttagaggagaaaatttttaaagatttggtaagagaaggaaaagtttaatataatttttttggttgatgggggtgtattaaagatattgagatttaattaaaggaatattttattagggggttgtgaaatttttgtgtttattaaaataaggtaaaagtttttttaagagtttgagaaatttttatttagattaatttattaaaaatatttatagtttaaaaaataaatagaaaaagagttttaaaaaagttaatagatatgtttaatttagaaaattgggaagtggtttaaatttttttgagttttagtttagttttttaatattatatattggttatgattaattaagatttaattgtatattagttgttgaaatgttttttgtataataaaaatttttaatatgaaataaaggttttatattattagttgagttttttattaataaatttttgattttgttttttatatttatatttaagaagggaggtatatttttttagtatttattaaatgttttttttgtatattattaagttatttaatataattttgttggtttaatggtattgtatttattttgtagatgataagttgaggttagatgaagttaattataaaattagtggtattgaaatttaatttagtgtaattttaaagttttttttatattaagttgttttttgtatggtaatagaatttttggaatttgtttgtagagaatgagtagggtttttgtttttttatggttttggttaggtttagtttgttttgtaatttgtaggtaatagagttatggaaattaaatgaattgttgttaagttggtgtaagattattatttagtatattttatgaagatttggttttaattgaatagattgaaaattaattttataatttttttgtagtgttttttagaaattagttattgttattgtttagaaaattgggggattgtttttttaagtggttaaaatgggttttttattagagtttgttatttgtttagttggtataaggttagttatataattttgtaaattttttgtaattttttgaaggggttaaagtttatgttttagtaaaagtataggtgttttttgtttagtgaagatatgtgtatgtgtttatttgtttttttttaaagtaattattatttggtggtgttatttttttttatgtttgttttatttatttagtttttttttttgaatatttttgtttaattttataagggtagagttggtatttagtttttgtttgttatagttggtatttgttaggaaagatttagttgagtttgatgttatgatttgaatagttatttgattagtttagttagaaagtttgtaaattttattttaggattgttatttttttttgttgtttttttgttggttttttttttgtgtgttgttaagttttgttatgtatgtgttttggttattttgtggtttgtttgtgtttttgttattttttgtgtaggtgtttaaggagtttttggattttaggtttttgtggttgggagaaaaggaggtggggatttgaagggggaaatgattttgaggtgtttggatgttgtttggaagttaattagagagtgtgatgttagtttggtgtggagtttggtggttggggtttatagtggtgggagttggaggtgataatgatttgtgttgtgagaggtgtaagttgtgatttttgttgaatttggaggtatttttatgattttttttttagttgaggttttttttttgattttgatgttttttaatttggtgttttgttagttttagtttggtgttttgagaaatggtgagtaatggttttaattgttgtttggagttggtggaatttattttttttgaaatatatgttatttttgattagggttgattttaattttgaatttagtttttgagtttttttatggtaagggtaaattagtgttagtagggattattaaagaaagttgtatttttatttttttgggatatttgtaattgtaattgggtttttaaaattgtaatgtaggtagggatgttgaaataattgttttttaaggttttttatagtttatatttttattgtgtgttaatgggaaaatgtatgtatttgtgtgtatatgttttttttaatggttatttgagatgtttaaaatttttaattattgattaatttatttgtttgttgtagaattttagtgagtttagttatgtgttataggtatatattagtgaatatgatttgttgttaaggaatttagttaagtagagaagataggatatttgtttttaataggaataaaattttattttttttgtttattatatggttataaaaatttaaattatagagtgaaagatgtttgtaattatatttgttagagatgatttttgttaatagattgaagtatattattttagatgtttttgatgttagaggtaatatttattatttttagaaattggattaaaatgtttagtttttttattttaatggtataagttgaatgtatttttatgttaatatgtagaaatttaatttatttttttatgttaaaatattggtaataagagatttgaggttagatttggatgttattaatttaaattttttggtaagttttagataagggagttaattatttagattaattttg

SEQ ID NO: 221 - DNA, 4001 bp, Artificial Sequence
  chemically treated genomic DNA (Homo sapiens)
taaggttaatttgggtagttagtttttttatttgaaatttattaaaaagtttaagttgatgatatttaaatttaattttaaattttttattgttaatgttttagtgtaagaaaataagttagatttttatgtattaatatgggaatatgtttaatttatattattaaagtgaaaaaattggatgttttgatttgatttttgaaaataataggtattatttttagtgttgaaaatatttggaataatatattttaatttattaataggggttatttttggtggatgtggttataggtattttttattttataatttaaatttttatgattgtgtagtaaatggggaaaataagattttgtttttgttagaagtagatattttgttttttttgtttgattgagttttttaatagtgggttatatttattggtatatatttatagtatatagttgggtttattaagattttataataaatgaatgaattaattaatgattaggagttttgagtattttaaataattgttgaaggaaatatatatatataaatgtatgtatttttttgttaatgtgtaatggagatgtaagttgtaaggggttttggaaggtagttattttgatgtttttgtttatgttatgattttaaaagtttgattatgattataagtgttttgaggggatgaaagtatagttttttttagtagtttttgttaatattaatttatttttgttatgggagaatttagaagttgagtttagaattggagttggttttggttggaggtggtgtgtgttttgggggaaatgaattttgttagttttgagtagtggttgggattgttatttattattttttaggatgttaagttggggttggtggagtattgaattgaagagtattagggttggaggaaaagttttagttgagagaaaagttgtagaaatgtttttaagtttagtagaaattgtagtttgtgttttttataatataaattgttattgtttttaatttttgttattgtaagttttggttgttaaattttgtgttaaattgatgttatgttttttgattggtttttgagtgatgtttgggtgttttagagttatttttttttttggatttttgttttttttttttttagttgtgggaatttggagtttaagagttttttgagtgtttgtgtagggggtagtagaggtgtggataaattgtggggtgattagggtgtatgtgtaatagggtttgatagtgtgtggaagaaaaattagtaagaaggtggtgggggaagatggtggttttggggtagagtttgtaagttttttgattaggttagttgagtaattatttgggttatggtgttaaatttaattaagttttttttggtagatgttggttatggtgaataggaattggatgttaattttgtttttatggaattggataaaggtatttgaaagagagggttgaatgggtgaaataggtgtggggggaagtggtgttattaggtggtggttgttttgggagaagatggataggtgtatgtgtatgtttttgttgggtggggagtgtttgtgtttttgttggggtgtgggttttgatttttttgggaggttgtgggaaatttgtaggattgtgtgattggttttatattggttaaataagtagtgagttttagtgagaggtttgttttgattatttgagggagtagttttttgattttttaagtagtgatagtggttagtttttaagagatattgtaaagaaattgtgaaattggtttttagtttgtttagttgagattaggtttttatgaaatgtgttgaatagtaattttgtattgatttgatagtgatttatttgatttttatagttttgttatttgtgggttataaggtaggttaaatttggttaagattataaaaaagtaagggttttgtttattttttgtggataagttttaggagttttgttgttgtatagggagtagtttggtgtagagggagttttggggttatattgagttaagttttaatgttgttgattttatgattaattttatttagttttggtttgttgtttgtaaagtgggtatagtattattgagttggtagaattgtattaagtgatttaatggtatgtaaaagaagtatttagtaaatgttgaagagatatatttttttttttagatgtggatatgggaggtaaggttggaaatttgttagtaaagaatttgattagtaatatgaaatttttattttatattgaggatttttattgtatgggaaatattttggtagttggtatataattaaattttgattaattgtagttaatatataatgttggagaattggattagaatttagaagggtttgagttattttttagttttttgagttggatatgtttattaatttttttgggattttttttttgtttattttttaaattgtgaatatttttagtgggttagtttaaataagagttttttaggtttttaaaaaagtttttattttattttgataaatataaaaattttatagttttttaatgggatatttttttggttgagttttagtatttttagtgtatttttattaattaagaaaattatgttgaattttttttttttttattaaatttttaggggtttttttttttgaaaaaaaaaagtataatattaaatgtgtttttttttttttttttggagatagagtgttgttttgttgtttaggttagagtgtagtggtgttattttggtttattgtaatttttgttttttgagtttaaatggtttttttgttttagttttttgagtagttggaattataggtgtttgttattatgtttggttaatttttgtatttttagtatagatggggttttattatgttggttaggttggtttttaatttttgattttaggtgatttgtttgttttggttttttaaagtgttgggatttataggtatgagttattgtgtttggttttaaatgtgttttttaaatatttttttttttattttgatatattttttttttattttttagtgaaagttataggttaggataatatttaatatttttatgagttttaaggatattttttattattttggtgtagttgagtttgttttatgttgataataggatagtggttgtggaatagggataaagatggggtattgaagaggagtttagaatggtttaattttttaaattttgtagttgtaagaaaaaaattataattttttttttttaaagaagagttgaaatgaaaatattttatatttataggaaagaaattaggtgttaattttagatatagagtaagtgattatttgtattttttttagtaatgtttggtgtgagtgttttataggtgaattttaggtttagaaagatgatttgtttttttttattttatttgtagtaatttttaaagttgttaggaaattaagttatagaaatagttagttttgtgtagaatatagttgagtattttaaatattgagttattttattttgtatttgttaaagtatttttgttttgtgagttaaaggttagaaggttataagttttaatttttttttttgtttttaaattttaaggaatattgtttttgaaatattttttttattttagtatatatatttagatatatgatttatttgattgggttttgtattaggaatatggtagttaatgagataaaatttttgtttttatagagtttatattttagatagtagatgtagatattttgtaaatatagtaaatgtgatagttagtgatatatattataaaggaaaatgaagtaatgaaagggattggagaaaattgatttggggttggagttgattttttattttatgaagtataggtaagaaagatttttttaattaagtggaagaatagtaagtataaaggttttgaggtagaagttttttttgtatgtagttatttggagtaaagtaataggtaatgagtatagaaagat

SEQ ID NO: 222 - DNA, 2501 bp, Artificial Sequence
  chemically treated genomic DNA (Homo sapiens)
aaagatgattaaaagtttaattgtttatttgaagagttgatttttttatttttgtaataaagggtatttttagtagtttttgtttattttgtttattcggttttttttgtggttgtgtaaggttataatttttgtgttttagtaaatttgtgtatgtttatttttttttttgttattatttttttttttattttgttttattattttgatgtaaaattatttgttaattttatttgaaatgagaaattttaaggtttatattatttaaattttgttagatttttatttttgttatatggtttataatgtgttgggtatttttagatttgtttattaaaaagatgtaaaataaaataatgattatttttgtggattttttttttatttttgagatgttttttttggttgtattatttttttattttttgtttattgattagaggaggggttttaattatgggtgaattttatattttattgaagaggttatgttatatgtatatttttataatataatttatatttatatagtatttttatttttagtatatttttttttattaattttaataatattattgtaagttatgttgaagtagattgtaagtgtttatttataaattgtgaaatgaattaaaatgaaagggtaaagattaaattatgattaggtttgaaattaatatataagatttaattttttttaattaaagatttttgtaggtgatttttgtttgtaggatttttttttttttttagatgttattggattgtattaggtttattgtagattttagtcgttgtagaattaattagatttaagatgagttttttgattttttttggtagagttttttaattgttgaattttaatattgtcgtgattagttagtgttataatttgtttgttttattttgtgtaatggattttatattatagaggtatttttttaatgttaagatgtttaagtattgtttaagtgtaaattatttaatattttttagttattaagtaattaagataggtaggattttatttgttttaaaatgatttgatttaaattaaaaagagaatgtggattttttgaattttatttggttaattttaatataatttttagtattttataattttttttaaagtttttttatttggttattttttgtattttttttgttttttttttttttttttagttataataattgttagattttgttttatttttttttgatagtttttatttttaaggttatttattttttttaggtattttttggttttagtttgagtatagtagattttaagattatatatgttatagtataggttattatagttaattttttgaataaatgtgattgaattttatgttagtaatttttatttattatttttttattaaaaaggtttaaagtttttatttaatgtttttttttatgtttattttgttaaatgattgttttttaatgatattttagaattttagaattattttattatggaggatgtgtaagattagttttttattaaataaaaagtgtgaaatggaatatgtaattttattaatttattttggttttaaaattttgtgattattagataaaatttagaaataaaatagtattattaatataaataaatttttattataattatattttttaagttttgtttgtaagaatgggtaaaatatttttaaaattttgaagaaattattatttgatagaaagtttaatttatttgtgagaaggtaaatgtatttagatataattaaagtttttttttttattttaattttatttattttgaattaagattttattgttttatttttttagatgttgttatttgaataatattgttttgagattaaaaattagtatattaatataattttttttaaacgttttaagagttttgttttttttatttttttttttaaaaataagtagttattaaattttttagtagtgaattttaaaattttttttaattttataggtttaagggtagttaaggatggttgtagttttatatgattagttgttaaagtaagttgaggtattgaagatggagaatttaaattttcgataagagttagaagataattttaattattttataaaattggaaattgaggtatttaatatgaaggtattaagattgtgatttttaattgtagtttatttatttttatttagtatttttttttgtaaatttgaggtaagatattttatttaaaagtgtattttaaattaagtaataatatgtaaatttttttttgtaaaagttagtatttatatttttaaataagatatattgaatttatttagtgaattatataaagaaaataagtgtaaaattttaatggttagttagtttttagttttttttaagattaaagagaagagattaaatatagtattattgtattgaggtaaggttttttgtgtagtttatagaaattagttttatgattttagaatatgttttgaatatt

SEQ ID NO: 223 - DNA, 2501 bp, Artificial Sequence
  chemically treated genomic DNA (Homo sapiens)
aatatttaaggtatattttaaaattatgaggttagtttttatgaattatatagaaaattttgttttagtatagtgatgttatatttggttttttttttttaattttaaaaagaattaagaattaattagttattggagttttatatttattttttttatatgatttattgaatgaatttaatatattttatttaaaaatataaatgttaatttttgtaagaaagagtttatatattattgtttaatttaaaatatatttttaagtaaagtgttttattttaagtttataagagggaatattgaataaaaatggataaattataattaaaagttatagttttgatatttttatattagatgttttagtttttagttttgtaagatgattggaattattttttagtttttgtcgaagatttgagttttttatttttagtgttttaatttgttttaataattgattatatgaagttgtagttatttttggttatttttggatttataaggttaaaaaggattttgaaatttattattaaaaaatttagtggttgtttgtttttaaagaaaggggtaaaggaaataaaatttttaagacgtttaagaagaattgtgttaatatgttagtttttggttttaaaataatattgtttaagtagtagtatttaagaggatgaaatagtggagttttagtttaagataaatgaaattaaaatagaagagagaattttagttgtgtttgaatatatttgtttttttatagatggattaaattttttattaagtaataatttttttaaggttttaaagatattttatttatttttataggtaaaatttaggaaatataattatgataaaaatttatttatattagtaatattattttatttttgaattttatttgatagttatagaattttagagttagaatggattaatgagattatatattttattttatattttttatttgataaaaggttaattttatatattttttatggtgaaatagttttgaagttttaagatgttattaaaaggtaattatttaataaaatggatatgaaggagagtattaaatgaagattttaagtttttttgataggaagatggtaaataagaattattaatataaagtttaattatatttatttaaaaggttgattataatagtttatgttatggtatatgtggttttgggatttgttgtgtttaaattgaggttaaaagatatttaaagagaatggatgattttaggagtagagattgttaaagagaaatgaagtagagtttggtagttattatgattgggaaagaagaggagagataaagaagatataaaagatagttaggtaagaggattttaggaagaattatagaatgttaggagttatattaagattaattaagtaagatttaggagatttatattttttttttagtttaggttaaattattttggaataaataaaattttgtttattttaattatttaatagttaaaaagtattaagtagtttgtatttaagtaatatttaaatattttgatattaaaaaaatgtttttgtaatatgaaatttattatataaaataaggtagataggttgtaatattggttagttacgataatattggagtttagtaattggaagattttattaaaggaaattaggggatttattttagatttagttagttttataacggttagaatttatagtaaatttggtataatttaatgatatttgaggaggaaggggagttttgtaggtagggattatttataaaagtttttggttgaaaaaaattgagttttgtgtgttaattttaggtttggttatgatttaatttttgtttttttattttaatttattttataatttgtaaatgaatatttataatttgttttaatataatttatagtgatattattaggattaataaaaaaaggtatgttaaaaataaaagtattatgtaaatgtaagttatattatgaaaatatatatgtaatataatttttttagtaagatatagggtttatttatagttaagattttttttttgattaatgggtaaggggtgaagaagtaatgtagttaaaggagatattttaaaaataaaggaaaaatttataggagtgattattattttgttttatatttttttaataagtaggtttgaaaatatttagtatattataaattatatgatagaggtagggatttgatagaatttgaataatgtgaattttaaaattttttattttaaataaaattaataggtaattttatattaaaataataaaataaaataagagaaaaggtagtaatagagaaaaaaatgggtatgtataagtttattgagatatagaagttataattttatataattataaaaagagtcggatgggtaagatgagtagagattgttaaaagtattttttattataggaataaaaaaattaattttttagatgaataattaaatttttaattattttt

SEQ ID NO: 224 - DNA, 6277 bp, Artificial Sequence
  chemically treated genomic DNA (Homo sapiens)
gtgcgttaagattatgttattgtattttcgtttgggtgatagagcgagattttgttttaaaaataaaataaaaaattggttcggtgtggtggtttatgtttgtaattttagtaatttgggaggttgaggtggaaggatcgtgaatttaggagttgaagattagtttgggtaataaagtcggattttgtttttttaaaaaaattaagtttaattaaatatttttaaaaataataaattagttattagaattataaatttgtattgtttttgataatgtaatgtattgttttgtaaaatattataattaagattgttattttaaggattttgaagtttgtgaagattaggtatttttttgaaattttaagataattattttttagttttttttattttttgtttttatttagaattaagtttattattaaaacgtagttttgttgacgttaagtatttatttatatgatatgtaattattggggtcgttaaaatttgggtagaatttttgttaatttattaggattttaggtaaaaaattaggaaaatgaagtgattgatttagtttgttaaaagcggatattttgaaatattattttttaattttaagaaatattttttgttaggtgcggtggtttacgtttataattttagtattttgggaggtcgaggaaggtagattacgaggttaggagatcgaggttattttggttaacgcggtgaaatttttatttttattaaaaatataaaaaattagttgggcgtgatggcgggtgtttgtagttttagttattcgggaggttgaggtaagagaatggcgtgaattcgggagatagagttcgtagtgtattagtcgcgatcgtgttattgtattttaggttgggcgatagagcgagatttagttttaaaaaaaaaagaaaaaaaagaaatatatttttttattcgttagggaaattaattttcgttttttttttttaaattatataattggaaattaatttagatattttggagtttttttagttggtgggttaattaagagaaaataggaagtgggagattttagtttagttggattatatttaggtttttataaggaattttttttggttggtatgtaaaaaaatttttttagtaagagtattaattttgaacgtgtgtaaatacgaaagttatggttaattttatttgttttttaggtttatagttagtagagttagatagttgggttttaggtttttagtttttataattgatattattgttaagtttatgtgattgatttattttgttttggtataagttagttttttttttatatcgattttttttttttttagttttaataaaatttttttaatgaaataaatttggtaattcgaattttggttattgtttttattagaggtttgtataagttaagttatttaagttgaggtcgggagtggtggtttatgtttgtaattttagtattttgggaggttaaggtaggaggatcgtttgagtttaggagtttaagattagtttgggttggtttttgagaaagcgagattttgtttcgaaaaaaaaaaaaaaaagtgtggtttgaaagttgagtgtttgataaaaaggagaaatagtgtttttttaaaattaaaggtttttaattaagatttttttaacggggtttcgaaaaaaggagaatgggatgagaaggatatatgggtagtgttattttttaatttgtagattttattttagttttttagttatcgttttttagtattttatgtttttaagatagtgttattattttaaggatttttttttattttttttgtttgggttttttttttattgaggagtcgtggttttttattagtagaagtcggatgtttttgtgttcgaaattggtgggtttttggttttattgattttaagaatgaagttgcggatttttacggtgagtggtatagtttttaaagatgatgtgtttagagtttgttttttttgatgttcggacgtgtttagagttatttttttttggtggattcgtggtttcgttggttttaggagtgaagttgtagatttttgcggtgagtgttatagtttttaaggcggtatgtttggagtttgttcgtttttttcgtttggagttgtttattttttttggtgggttcgtggtttcgttggttttaggagtgaagttgtagatttttgcggtcggtgttattagtagataaatgttatgcggatttaaagagtgagtagtagtaagatttattgtaaagagtataagaataaagtttttatagcgtggaaggagattagagcgggttgttgttgttggtttaggtagtttgtatttttttttttttttttttttttttttgagatggagtttttttttgttatttaggttggaatgtagtggtgtaatttgggtttattgtaagtttcgtttttcgggtttacgttatttttttgttttaatttttttagtagaggggattataggtatttattatcgtatttagttaatattttgtttttttagtagagtcggggttttattgtgttagttaggatggtttcgattttttgatttcgtgatttatttttttaggttttttaaattgttgggattataggtgtgagttattggtatttagcggggtagtttgtttttatttttttatttgattttatttatattttgttgattggtttattttatagagagttaattggttcgttttgatagggtgttgattggtgtatttataatttttgagttagatatatatagagtgttgattggtgtatttataattttttagttagatataaaaattttttaagtttttattatatttgttagatatagagtattgattggtgcgtttataaatttttagttagatatagagtgttgattggtgtatttgtaaattttgagttagatatagagtattgattggtgtatttataattttttagttagatatagaagttttttaagtgtttattagattagttagatatagagtgttgattggtgtatttttaaattttaagttagatatagagtgttgattggtgtatataaaatttttaggttagatataaaagttttttaagtttttatttgatttaggagtttagttggttttatttagtggattttgcgtagggttgtgtcgggcgtttgtattttttttagtttttgggtagtcgatgggatcgggcgttgaggagtagggggcggtgttcgtcggggaggtttaggttacgttggagtttataggggttgggagggggttcgggtatggcgggttgtaggttttgagttttgttttgtgtagggcggttggggttcggtgagaatttaagcggggtgtaggcgggtcggtagtgttgggggattcggcgtattttttgtagttgttggttcgggtgttaggtttttgattgttcggggtcgggggtgcggggttcgttgagttcgcgtttatttggaattcgcgttggttggcgagcgttgcgcgtagttttagtttttatattcgtttttttttttatattttttcgtaagtagagggagtcggttttggtttcggttagtttagagaggggtttttatagcgtagtggcgggttgaagggtttttttagtacggttagaatggacgttaaggtcgaggaggcgtcgagagcgagcgagggttgttagtacgttgttatttcgtattttgaattatagattttttaatttttcggcgtttttcgtttattcggttttttagaatacgaagggtttttttattttgttattaaaacgattagttgttcggagatacggaaaaagtcgttttttttttttgtaggattttttttttgaatttttttaaatttttttagtgtgacgtgattttatttttagttaatttaggttgtttttttattagtttttcgttttttggggaggcggtaatgtaaagatcgttcgttgttagttttgtcgttatttttgtggggtgaatttaatatggcggataaagatagtaattagtttcgttttttcgcgttttcgttaagaagattggtttttattatttgttttttaaaacgattattttattgattggtggcgattgcgtcgacggagacggggtaaaagtaagttgaattcgaaaaataataaatattggggttgaggggtggaattacgagtgcgtagatatgggttagagcgtattttttttgttttaggtaaattcggcgtttattgcgttttcgtaggttattgattttataagattatttgttttagatttttggggttggatgggaattgtagtttttttaaagagttgtacgtatttttttaaggtttagtttttgtttttaaaatacgaaaatataatattttagtttataattgttgataagtataagcgcgtataggtttttaatttatttattggattttcgtgagaattgtgttcgttttggtattggatgtttttttttataagattatagtttttaaggaatattgtggcgaagattttttatttcgtaacgtatgttggaaataattatttttttttatttttttaataatttttattatttatatttatcgaaattggagatttttattagggcggaaagagtgggggattgggatttttttttacgattgttttggataataggtagcgattttgattttcgtatagtaattattgtgatgtaataagtcgtaattggaagagtagaggttagagggtaggtattttatggtaaatttaggtagaattttttttttttcgtttttttttttttacgttattcgggggtagattgggtggttaatttagagtttcgagagacgtttggttttttttgttttttttattttttgattgtattttgatttcgtattttgagaggttgttgtttagcggtagttttttggttttcgtggtaacggaaaagcgcgggaattatagataaattaaaattgcgattgcgcggcgtgagttcgttgagattttttggacgggggataggttgtggggttttttagataattgggtttttgcgtttaggaggtttttattttttgttttgggtaaaggtagtagagtttcgggaaagggatagggggtttaagtgatgttttggggtattggcgtgggagagtggattttcgaagttgatagatgggtattttttgacggggggtaggggcggaatttgagaggcgtaaggcgttgtgaattttggggaggggggtagtttgtaggtcgcgagggaagcgttgaggattaggaagggggtattgagtgttcgtgggggaattttcgtgataggaattggaatatgttttgagggggatattatgtttttaaaaacgtcggttggttatgaggttaggagttttagattagtttgattaacgtggtgaaatttcgtttttattaaaaatataaaaattagtcgggcgtggtgtcgttttagttatttaggaggttgaggtaggagaatcgttagaattcgggaggcggaggttgtagtgagtcgagatcgcgttattgtattttagtttgggcgatagagcgagattgttttaaaataaaataaaataaaataaaataaaaaatatcggttggtatgtatgagaggatgggattttgtggaagaagaggtgttaggaatatgtttgggaaggggaggagataggattttgtgggagggagaatttaagaattggatttatttgcgttattgagaaagcgtaagagggaagtagaggagcgttagtagtaatagatgttgtcggtagggatgtgtttgaggaggatttagagatgagagtaggttattgggaaaggttaggggcggggaggttttgattggtgttggtttggtcgttgttgattttggttttatgtaagaaaaagaaaataattagaaatattggagaaagttaaggttattattatttattcggttagttatttttttgtagtttttttttttttggagaaaggaaaagatttaaggggttggtagtaatatgtgaaaaaatttagaatttatgttgtttaattataaaaagtaatttttagaatttttaaaaataaaggacgttgttattagttttttggtttgtattattttaaaattttttaaattttaaatttattttattttaaaatgataaaatgaagttgttattttataaattttttaaaaagatatatatatatgtttttttaatgtgttaaagt

SEQ ID NO: 225 - DNA, 6277 bp, Artificial Sequence
  chemically treated genomic DNA (Homo sapiens)
attttaatatattagaaaaatatatatatatatttttttaaaaggtttataaaatgataattttattttattattttaaaataaagtaaatttaagatttggaaggttttagaataatataaattaaagaattaatgataacgttttttatttttaaagattttagaagttgttttttgtaattagataatataaattttgaatttttttatatattgttgttaattttttgggtttttttttttttttaagaaagagaaagttatagaggagtgattgatcgggtaggtggtggtagttttagttttttttaatgtttttggttgtttttttttttttgtataaaattaaaattaataacgattaaattaatattaattaaggttttttcgtttttaattttttttagtgatttgtttttatttttggattttttttaagtatatttttgtcggtagtatttgttattattgacgtttttttattttttttttgcgtttttttaatggcgtaaatggatttagtttttaagtttttttttttataaaattttgtttttttttttttttagatatatttttggtatttttttttttataaggttttatttttttatatatattagtcggtgttttttgttttgttttgttttgttttgttttgagatagtttcgttttgtcgtttaggttggagtgtaatggcgcgatttcggtttattgtaattttcgtttttcgggttttagcgatttttttgttttagttttttgagtagttggagcggtattacgttcggttaatttttgtatttttagtagagacggagttttattacgttggttaggttggtttggaatttttgattttatgattagtcgacgtttttaaagatatagtgttttttttaaggtatattttagtttttattacgaggatttttttacggatatttagtgttttttttttgatttttagcgtttttttcgcgatttataaattgtttttttttttagggtttataacgttttacgttttttaggtttcgtttttatttttcgttaaagaatatttatttgttagtttcggaaatttatttttttacgttagtattttagagtattatttgggttttttgtttttttttcgggattttattatttttatttagagtagagggtgaaggttttttgagcgtaggggtttagttatttgagaaattttatagtttgtttttcgtttaggaagttttagcgagtttacgtcgcgtagtcgtagttttaatttatttgtaattttcgcgttttttcgttgttacggaaattaaggggttatcgttaagtagtagttttttagaatacgaaattaaggtataattagaggatgggagggatagaaagagttaagcgtttttcggggttttggattggttatttagtttgttttcggatgacgtaaaaggaaagagacggaagaggaagaattttatttgagtttgttataaagtgtttgttttttagtttttatttttttagttgcggtttattgtattatagtaattgttgtacgaaggttagaatcgttatttattgtttaaagtagtcgtaagaagaggttttaattttttatttttttcgttttaatggaggtttttagtttcggtaaatataagtaataaggattgttgggggggtggagggaaataattatttttagtatgcgttgcggaatgaaaggttttcgttatagtgttttttagaaattgtagttttatggagaggaatatttaatattagagcgggtataatttttacggaaatttagtggatagattggagatttgtgcgcgtttgtatttgttaatagttatggattggagtgttatgttttcgtattttgaaagtagaaattaggttttaaaaagatacgtataattttttagggagattataatttttatttagttttaggagtttggggtaagtagttttgtaaggttagtggtttgcggggacgtagtgagcgtcgaatttgtttggggtaggggaaatgcgttttggtttatgtttgcgtattcgtagttttattttttagttttagtgtttgttatttttcgggtttagtttgtttttgtttcgttttcgtcgacgtaatcgttattagttaatggggtggtcgttttgagggataagtggtaagagttaatttttttggcgaaaacgcggagaaacgggattagttattgtttttgttcgttatgttagatttattttatagagatagcggtagagttggtagcggacggtttttgtattgtcgtttttttagggggcgggaagttggtaaggaagtagtttgggttagttaggggtggggttacgttatattaagagggtttggagaagtttaagggaggaattttgtaaagaagaggggcgatttttttcgtgttttcggatagttaatcgttttagtgataggatgagagagtttttcgtgttttgagggatcgagtgggcgaaaagcgtcggagagttggagagtttgtggtttagaatgcgaggtgataacgtgttagtagttttcgttcgttttcggcgttttttcggttttggcgtttattttggtcgtgttggaggagttttttagttcgttattgcgttgtgggggtttttttttgggttggtcgaagttagagtcggttttttttgtttgcggggaagtgtggagggagaggcgggtgtgggaattggggttgcgcgtagcgttcgttagttagcgcgagttttaggtgggcgcgggtttagcgggtttcgtattttcggtttcgggtagttaggggtttagtattcgggttagtagttgtagagggtgcgtcgggttttttagtattgtcggttcgtttgtatttcgtttgaatttttatcgggttttagtcgttttgtatagggtaaggtttaggatttgtagttcgttatgttcgagtttttttttaatttttgtgagttttagcgtggtttgagttttttcgacgggtatcgttttttgttttttagcgttcggttttatcgattgtttaagggttgagaggagtgtaggcgttcggtatagttttgcgtaggatttattaggtgaagttagttgggtttttgagttagatggggatttggaaaatttttatgtttagtttgaggattttatatgtattagttagtattttgtgtttagtttggggtttggggatgtattaattagtattttgtatttagttaatttggtgggtatttggagaatttttgtgtttagttaaaggattgtaaatgtattaattagtgttttgtgtttagtttaaggtttgtaaatgtattaattagtattttgtgtttagttaaaggtttgtaaacgtattaattagtgttttgtgtttagtaaatgtagtggggatttggagaatttttatgtttagttagaggattgtaaatgtattaattagtattttgtgtatatttagtttagggattgtaaatgtattaattagtattttgttaaaacggattaattagttttttgtaaaatggattaattaataggatgtgggtggggttagataagggaataaaagtaggttgtttcgttgggtgttagtggtttatatttgtaattttagtaatttgggaggtttagaggggtggattacgaggttaagagatcgagattattttggttaatatagtgaaatttcgattttattaaaaagataaaatattagttgggtgcggtggtgggtgtttgtaattttttttattggggaggttgaggtaggagaatggcgtgaattcgggaggcggagtttgtagtgagtttagattgtattattgtattttagtttgggtgatagagggagattttattttaaaaaaaaaaaaaaaaaaaaaaaaaaatgtaggttgtttgagttagtagtagtaattcgttttggtttttttttacgttgtggaagttttgtttttgtgttttttgtaataaattttgttgttgtttattttttgggttcgtatagtatttatttgttggtaatatcgatcgtagaggtttgtagttttatttttgaagttagcgagattacgaatttattaggaggaatgaataattttagacgggaggaacgaataaattttagatatgtcgttttaagagttgtaatatttatcgtaaaggtttgtagttttatttttgaagttagcgagattacgaatttattagaaggaggtaattttgaatacgttcgaatattagaaggaataaattttggatatattatttttaagaattgtattatttatcgtgagggttcgtaattttatttttgaagttagtgagattaagaatttattaatttcggatataagaatattcggtttttattgatggaaggttacgattttttagtagaaagagggtttaggtaaagaaaatgagagagagtttttggggtggtgatattattttgggaatatggagtgttaggaaacgataattggaagattaggatgaaatttgtaagttaaaaaatgatattatttatatattttttttattttattttttttttttcgagatttcgttaaagagattttggttagggatttttggttttggaaaggtattgttttttttttttgttaaatatttaatttttaggttatatttttttttttttttttcgagataaagtttcgtttttttaaagattagtttaggttggttttgaatttttgagtttaagcgatttttttgttttggttttttaaagtgttgggattataggtatgagttattattttcggttttagtttggataatttggtttgtataggtttttggtggagatagtaattaaagttcgggttgttaggtttgttttattaaagggattttgttgaggttgaaagaaaaaaaaatcgatgtggaggaaaagttaatttgtgttaagataaggtgagttagttatatggatttaataataatgttaattatgaaagttgaaggtttaggatttagttatttgattttattggttgtagatttaaggagtaggtagggttaattatagttttcgtgtttatatacgtttaagattaatgtttttgttgaaagaatttttttatatgttagttaaagagagttttttatggagatttggatatggtttagttaagttagaattttttattttttgtttttttttagttggtttattagttggaggagttttagaatatttaaattaatttttaattgtgtaatttgagaaaaagagacgaagattaatttttttaacgagtagggaagtgtgtttttttttttttttttttttttgagattgagtttcgttttgtcgtttagtttgaagtgtagtggtacgatcgcggttagtgtattgcgaattttgtttttcgggtttacgttatttttttgttttagtttttcgagtagttgggattataggtattcgttattacgtttagttaattttttgtgtttttagtagagatgggggttttatcgcgttagttaggatgatttcgattttttgatttcgtgatttgtttttttcggttttttaaagtgttgggattataggcgtgagttatcgtatttggtaggaagtgttttttaaagttggaaagtggtattttagaatattcgtttttggtagattgagttagttattttatttttttgattttttgtttaaggttttggtgaattgataaagattttgtttaaattttaacgattttagtaattatatgttatatgaatgaatatttgacgttagtaggattgcgttttggtggtgaatttggttttaggtagaaataaagaatggagaaaattgggggataattattttagggttttaaaaaagtgtttgatttttatagattttagggtttttaaaataatagttttaattgtagtgttttatagggtagtgtattatattgttaaaaatagtataggtttatggttttaatgattggtttattatttttaaaaatgtttaattgaatttaatttttttaaggagatagggttcggttttgttgtttaggttggtttttaatttttaggtttacgatttttttattttagttttttagattgttaggattataggtatgagttattatatcgggttaattttttattttatttttgagatagagtttcgttttattatttaggcgggagtgtagtggtatgattttggcgtat

SEQ ID NO: 226 - DNA, 1630 bp, Artificial Sequence
  chemically treated genomic DNA (Homo sapiens)
gagttcgagttacgttatgttcgttgtacgtgttagtttgcgtagtatattagggcgttggtttttttttttttttttggagtgaaatatattaaagggcgcggtgggggtggggggtgacgggaggaaggaggtgaagaaacgttattagatcgtattttttgtaaagatagttttgatttaaggatgcgttagagtacgtgttagggtcgatcgtgttggcggattttatcgtagtcggtttttagggagaaagtttggtagagtgaggcgcgaaatcggagggtcggcgaggatgcgggcgaaggatcgagcgtggaggttttatgttttcggggaaaggaaggggtggtggtgtttgcgtagggggagcgagggggagtcggatttaattttttattcgttttttttttttttcgggttattttttagaaagttgtatcggtgtggttacgtttagcgtagatatttcgggcggtttgttagtagatgtaggggcgaggaagcgggttttttttgcgtggtcgttgggcgggggaatcgttgggagttttgttttcggtttgcggcggttttagacgttgtatcgcgtcgttttacgggtttcgaagagtttttagaaatacgatggtttttgttcgaggattatattttatttttttagagaagtatttttttttttttttaatatttattttttttttttttttttttttttgtatatattttgtaggggggggtagaagggacgttgttttggtttttttaatcggggttttcgaaatagtttcgaagttattaggaatatagattttagggatatgatttttatttttgggtatgcgaggttgttattttttaaaattatttttttttttattttttatttaagggatttatttttaaattgtttgaggttattttatttttagataatttattttatatttttggattttaaatataagggtaggaggattaggattcgttttgaagaagttaaagttggagggtcgtattttggcgtgttatatttatagaatgagtgaaattagagggtagaaataggagtcggtagttttttgtgggttgtttgttcggggtttttggtatgtaggttggatggagggagaggggtggggggtggcgggggatcgcgtttgaagttgggtcgggttagttgttgttttttttaataacgagaggggaaaaggagggagggagggagagattgaaaggaggaggggaggatcgggaggggaggaaaggggaggaggaattagagcggggaggcgcggggagagggaggagagttaattgtttagttagtttgcgttatcgttttagagcggagaagagcgagtaggggagagcgagattagttttaaggggaggatcggtgcgagtgaggtagtttcgaggttttgttcgtttattatttaattttcgttttttttttgttttattttttttttttgtttttatttttttttcgaaaattttttatttagttaaaggaaggaggttaggggaacgtttttttttttttttttaaaaaataaaaatagaaaaatttttttttaggtcggggaaagtaggagggagaggggtcgtcgggttggttatggag

SEQ ID NO: 227 - DNA, 1630 bp, Artificial Sequence
  chemically treated genomic DNA (Homo sapiens)
ttttatggttagttcggcggttttttttttttttgtttttttcggtttggaaaagggtttttttgtttttgttttttggaaggggaggggagagcgtttttttgattttttttttttggttaaatagggggttttcgggggagaggtgagggtagagagagaaggtggagtagaagggaggcgaggattgggtggtgggcgagtagagtttcggggttgttttattcgtatcggttttttttttaaaattggtttcgtttttttttgttcgttttttttcgttttgaagcggtgacgtaagttggttgggtagttagttttttttttttttttcgcgttttttcgttttggtttttttttttttttttttttttttcggttttttttttttttttttaattttttttttttttttttttttttttttttcgttattaaggagaatagtagttggttcgatttaattttaaacgcggtttttcgttattttttatttttttttttttatttagtttgtatgttaggggtttcggataggtaatttataaaaaattatcgatttttatttttgttttttaattttatttattttgtaggtgtagtacgttaaaatacgattttttaattttggtttttttaaaacggattttaatttttttgtttttgtatttaagatttaggaatgtagggtagattatttgaagatggggtgattttagataatttagaaataggttttttaagtgaaaaataagggagggggtgattttagaaaatagtaatttcgtatatttagagataaaggttatgtttttgaagtttgtgtttttgataatttcgaagttgtttcgaaagtttcgattaaagggattagaataacgttttttttgtttttttttgtagagtgtgtgtagaggaagaagagggagggagaggtgggtattaggaaggaaggggggtgtttttttggagggatagaatgtgattttcgagtagaaattatcgtgtttttgggggtttttcggggttcgtggggcgacgcggtgtagcgtttagggtcgtcgtaggtcgggggtagggtttttagcggttttttcgtttagcggttacgtaggaaaaattcgttttttcgtttttgtatttgttgataagtcgttcgaggtgtttgcgttgagcgtggttatatcgatgtagttttttaggaaatggttcgggagggggagggggcgagtgagggattaggttcggttttttttcgttttttttgcgtaaatattattattttttttttttttcggaggtatgaggtttttacgttcggtttttcgttcgtattttcgtcgatttttcggtttcgcgttttattttgttaggttttttttttgggagtcgattgcggtgaagttcgttagtacggtcggttttgatacgtgttttaacgtatttttgagttaaggttgtttttataggagatacgatttggtggcgtttttttattttttttttttcgttattttttatttttatcgcgttttttggtgtattttattttaggaggaaggggagagattagcgttttgatgtgttgcgtaagttggtacgtgtagcgggtatggcgtggttcgagttt

SEQ ID NO: 228 - DNA, 2501 bp, Artificial Sequence
  chemically treated genomic DNA (Homo sapiens)
ttaataaaattgtttaataaaatttataaaaatgtatttttgagaatattttttttagtttgaattgttttttttttttatttttaaagaaaatatataattattagtatttatatatgtatatatttaaaattatagtgatattttttatatagaattatattcgatatagtttgaattgtcgaaaaattaagataattttaaaaagtgattgtagggttgatttttttttttaaaatatttgagaaatagtaaagttattttaataaaagttttttttttgattgttaaaagttgaaatttatatttaaataaaaagagatttaaattaagatttttattattttttattttttaattaattttttttagggttatattttttttttgtttttaagaaaaaaatttggaattttgaatattttcggttttttgtgtatatttggaattgggtaaatgtgtttagtttagttagtattttttgtagatattattaaaagtaggtatttggggattttgggttttgagtataaattacggattttgtgttagaaatatatgttgagatttttttattttttttagaatttttagagatgaggtagatttattttaattatttttagtattagtttgttaaattgttaggtttaatgataagtttttttgttatttttaagtttattttttatagtttcgttttgtttttggttgtagtattttaggtattattttaagttttggagtatattatttttgttttagagttaaataaatattaatgaatatatttatttagaataagttattggatagttgtttattgtaagttatatatttaggagatgaaagagggaagttattaaaggtttttagagtagataatatttagttaagatgtggttagataaagatataaattttttattttaaaagagtttaataatttttgtattagagaatttttattttgggtaaagtaattgaatttaggagtgagagttgatattaaaatatggaggttgggtatagtagtttatgtttataattttagtattttggggggttaaggtagaaggattgtttgaggttaggagtttaagattagtttgggtaatatagtaagattttatttgtataaaaaaataaaaaggaggttggtgggagaattgtttgagttttagagtttgaggttatagtgagttatgattatattattgtattttaggtttgggcgatggagcgaaattgttttttaaaaaatggtagggagttggggagttgggtaggtgtagtggtttatgtttgtaattttaatattttgggaggttaagatgggaggattatttgagtttaggagtttgagattagtttgggtaatatagggagatttcgttttaaatatttaaaaaattagttatgcgtagtggtgtatgtttgtggttttagttatttgggaggttgaggtgtaaggatagtttgagtttgggaggataaggttgtagtgagttgtgattgtattattgtattttagtttggtcgatagaatgagattttgttttaaaaaaaaaaaaaaggtagagggatatattagtgtagtaatgagtagaagtatataaattttttttaaaaaattatatatataaaataatagaattagagtagttgatttttttttttttttttaaaagtgagataaaattttttaagaaaatttgtaaggtgttgggtgaattttttgatgttaaagttgtttttttggaatattaaaatttgggtattttttggatattattattatgtaaagagtgatgggaaaaaaaaaaaagttttaagaaataagtcgaaatttttttaatataaatttattagagttataaagtggagagagtataaagttatattaattgtattattaattagttttttttttttttttagaaatttattttaagggaagggagttgaaaaattattagtaacgtgatttttgtattttttagtatatgggtttggggttcgtttttttcgagttttttagtcgttttcgtcgttttcgtatatgttagttagttttttgaagcgattgttttattcgtttaagtagttatagttttggtttttgtttgattttgaggagtttagggagtttagattagtagtttcggaatcgttttttttatagttaaatacgagtagagaattataaggcggggttgtggggttagtattagtcgtttttagattttaaagaagaagggataaaagtattttttagtgaaaggaagggtatatttgttatttggggtaagaagtttagtaatatgtaaggtacgataatgtatttagatttgtggtatattacggagtagtgaatattaataacgtatatttatatatattgttatggaaggatgtagaagtataggatatgttgttgatggaaagagaaagtgaaatggtgagttatatgtaggtaggagagatgtaagtattaatta

SEQ ID NO: 229 - DNA, 2501 bp, Artificial Sequence
  chemically treated genomic DNA (Homo sapiens)
tggttggtgtttgtattttttttgtttatatataatttattattttattttttttttttattaataatatattttgtgtttttgtatttttttatgatagtgtgtataaatgtacgttgttggtgtttattgtttcgtggtgtgttataagtttgggtgtattgtcgtattttatatattgttagattttttgttttagatgataggtgtgtttttttttttattaaaagatgtttttgtttttttttttttagaatttgaaagcggttgatattgattttatagtttcgttttatgattttttgttcgtgtttgattatgaaggaagcggtttcgaagttgttagtttgagttttttgaattttttagagttagataaagattaggattatgattatttgaacgaatggggtaatcgttttaagaagttggttgatatgtacggaggcggcgaggacgattaggggattcgagagaggcgggttttagatttatgtgttgggaaatgtagaaattacgttgttggtggttttttagttttttttttttgagatgagtttttggggaaaaaaaagagattggttagtgatgtagttagtatagttttatattttttttattttatagttttaataagtttgtgttagaaaagtttcgatttattttttaaagttttttttttttttttattattttttatatggtggtgatgtttaaaagatatttaaattttaatattttagaagaataattttagtattagaaggtttatttagtattttgtagatttttttaaggaattttgttttatttttaaaaagaaggggagaagttagttattttagttttgttgttttgtgtatataattttttaaaaaaaatttgtgtgtttttgtttattattatattggtgtgtttttttgttttttttttttttttaagatagggttttattttatcggttaggttggagtgtagtggtgtaattatagtttattgtagttttgtttttttaggtttaagttatttttgtattttagttttttaagtagttgggattataggtatgtattattacgtatgattaattttttaaatatttgagacggggtttttttgtgttatttaggttggttttaaatttttgggtttaagtgatttttttattttggttttttagagtattgggattatagatatgagttattgtatttgtttagttttttaattttttgttattttttaagagatagtttcgttttatcgtttaggtttgggatgtagtgatgtgattatagtttattgtaattttaaattttggggtttaagtagtttttttattagttttttttttatttttttgtatagatggggttttgttatgttgtttaagttggttttaaatttttggttttaagtaatttttttgttttggttttttaaagtgttgggattgtgggtatgagttgttgtgtttagtttttatgttttaatattaatttttatttttgaatttagttgttttgtttaagataggagttttttgatgtagaaattattgggtttttttagggtaagaagtttgtgtttttgtttggttatattttgattaggtattgtttattttgaagatttttaatggttttttttttttattttttgagtatgtaatttgtaatgggtagttatttagtgatttgttttgagtaagtgtgtttattaatgtttatttagttttgaagtaagagtgatatattttaggatttagaatagtgtttaaagtgttgtagttaaagatagagcggaattatgaaaagtgggtttggagatggtaggagagtttgttattgagtttggtaatttagtaaattgatgttgaggatgattgaggtgggtttattttatttttgaaaattttggaaggaatggaggagttttaatatgtgtttttgatataagattcgtggtttgtatttaaagtttagaatttttaagtgtttgtttttgatgatgtttatagaaaatgttggttgagttgaatatatttgtttaattttaggtgtgtatagaaaatcgagaatatttaaaattttaaattttttttttaggagtaagaagaaaatgtggttttaaagggggttagttgaggggtagggggtagtgaggattttgatttggatttttttttatttaaatgtgaattttaatttttgataattaaagaaaagatttttgttgaaatagttttattgttttttaagtgttttggagaaaaaaattaattttgtaattattttttggaattgttttgatttttcggtagtttaagttatatcgaatatagttttgtgtagagaatgttattgtagttttgagtgtatatatgtgtgggtgttgataattgtgtattttttttgggggtggaaaaggaaaataatttaagttgagaaaagtatttttaaagatgtatttttataaattttattaaataattttgttaa

SEQ ID NO: 230 - DNA, 2501 bp, Artificial Sequence
  chemically treated genomic DNA (Homo sapiens)
ggtttattttttttatttttttttatatatgaataaggtattttatggtaggaattttgtttatatttgtttattttttatattagtattattgtttttattttgtatagttatttttgatgtaatattgaattcgttggaattgggttttttggtttttttttttgtttttttttaaattatttgttataatttagatttgttaaattataattattgtattgggttttttggatttttaaaaagtattttgtgggtcgggtatagtggtttacgtttgtaattttagttttttgggaggtttgaggtcgggagttcgagattagtttggttaatatggtgaaatttttatttttattaaaaatataaaaattagttaggtatgatggtatgtatttgtaattttagttatttaggaggttgagataggagaattattggaattcgggaggtagaggttgtagttagttaagatcgcgttattgtattttagtttggatgatagagtaagattttgttaaaaaaaaaaaaaaaaaaaaagtattttgtgtgattttgatgtattttaatttttgagaagtatttttttttattggaagtagagtatatatttgattttgattttttttatataataaatcgtttagggttattagaaagtattataatttattggttttttttaatttgttttttagagatatttttagttttatttttattttttttttttagatttttattattttagatttttattatttttgtttcgttttaagtttgtttttatttatttaaaaatatatggattattttatatggattgagtatgaaagaaatatagttttttaaagtaaattaaggagttgtttttagaggaaaggaaatggatggtggataggtaagaaaatgtggtttattagaattttatatggtgttgtatattgtgttgtatatatatatggtgtatgcgtatgtgtatatatgtgtatatgtatatattatatgtatatatattatatgtgtgtatatggtgttgtaggtatatatatgcgtatgtatatattatatatatgcgtatgtatatattatatatatgcgtatgtatatattatatatatgcgtatgtatatattatatatatgcgtatgtatatattatatatatgcgtatgtatatattatatatatgcgtatgtatatattatatatatgcgtatgtatatattatatatatgcgtatgtatatattatatatatgcgtatgtatatattatatatatgcgtatgtatttatgcgtatgtataggtatgtatatatatgtatatgtatatacgtatatggtatatatatgtatatgtatatgtatatacgtatatgtatatatatatacgtgtatatgtatatacgtatatggtatatatatgtatatgtatatgtatatacgtatatggtatatatatgtatatgtatatgtatatcgttaatttttattttttgaatttgttttgttatttagtttttatttttgtgtttttgaatagtttataatgttttttatatttttaagggtttttttattttttatttatttttaatatttagtttaaatattgattttgtgtagttttttttaatggttttgagtattttgtggttttgtttagttatttatatatgttaggattagattattttttttaaatgttattttgttagatttgattttttattttattgagaaggtatttaagtgtgtatatttagagtttagtatttgtttggaatacgcgagttcgttaaggatatgttttgattgagtgaagtttattagtataaagttatttgggtataggtattttgttgtgggataaaacgtaatatttgtgaattttgggttgggaaattatgtggtaatttatatttaataggttagagatattttagagataagttgtttaatttatttatgttttttttgttgtttcgtttgttttttagtgatttttagtgattgtaagggaaacgataagttacgttatgaggttttaagtttatattttaaggtgaatagcgatggcggtttagttgttttgagaaatataattgtagtgggtaaaattttgttcgtttatgtacggattttttatgcggaagatatggtagaattcgtgattgtcggggggaaagatatttagggttttttgtaggtaatatatttgtttgagataatttgggtttaaggaggatattaggttttgtttgttttatgtggaaaatgggtttttaatttattatgttggttaagattttttttgttattgttgttgtaaatgatagaaatttaatttaaaaaatgtagatgaggggtagcgggaattaattgatttatgtaattaattgaggtatagttcgtggattaatttatggaattattttagggatatttttgtttttaggcgtggttgaagttgtttaaattagttttaatttttgtgtat

SEQ ID NO: 231 - DNA, 2501 bp, Artificial Sequence
  chemically treated genomic DNA (Homo sapiens)
atgtatagggattaaagttgatttggatagttttagttacgtttgaaggtagaagtatttttaaaatagttttatgaattaatttacgaattatgttttaattagttatatgaattaattaattttcgttgttttttatttatattttttgagttggatttttgttatttgtaataataataataaaaggaattttagttaatataataaattaaagatttattttttatataagatagatagaatttaatgttttttttgaatttaagttattttaaatagatgtgttatttgtaaggagttttggatgttttttttttcgataattacgagttttgttatatttttcgtatggggggttcgtgtatggacgaatagagttttgtttattgtagttatgttttttagagtaattaagtcgttatcgttgtttattttgaagtatgggtttgagattttatagcgtagtttgtcgttttttttatagttattgaaggttattgggaaataaacgaaataatagaaggagtatgagtaggttgggtagtttatttttgagatatttttgatttattaagtgtgaattattatatagttttttaatttagagtttataaatgttacgttttattttatagtaagatgtttgtgtttaagtgattttgtgttgatggattttatttaattaagatatgtttttgacgaattcgcgtgttttaggtaggtgttaagttttgagtgtgtatatttgagtgtttttttagtggagtgaagagttagatttggtagagtgatatttgagggaagtgatttaattttggtatgtgtgggtgattgagtagaattatagggtgtttaggattattgaggagagttgtatagagttaatatttgagttgggtattgaagataagtaggagatgagaaggtttttaagaatgtggaagatattataggttatttaaaggtatagggatgagggttaaatagtaaaatagatttagggaatgagaattaacgatgtgtatatatatgtatatgtatatattatatacgtgtatgtatatatatgtatatgtatatattatatacgtgtatatatatatacgtatatgtatatatatatacgtgtatatatatatatgtatatgtatatattatatacgtgtatatatatatatatatatatatgtttatgtatgcgtatggatatatgcgtatgtatatggtgtatatatgcgtatgtatatggtgtatatatgcgtatgtatatggtgtatatatgcgtatgtatatggtgtatatatgcgtatgtatatggtgtatatatgcgtatgtatatggtgtatatatgcgtatgtatatggtgtatatatgcgtatgtatatggtgtatatatgcgtatgtatatggtgtatatatgcgtatgtatatggtgtatatatgcgtatgtatatatttatagtattatatatatatatatggtatatgtgtatgtaatgtatatatgtatatatatgtatatatacgtatgtattatatatgtatatagtataatatgtagtattatatagaattttagtgggttatatttttttgtttatttattatttatttttttttttttgaaaatagttttttaatttattttgaggaattatattttttttatgtttagtttatatggaatagtttatatgtttttaggtgaatagaggtaaatttaaaacggggtagggatggtgggaatttagaatggtggggatttagaagggaagggtggaaatgaggttgaaaatgtttttgggaaataagttgggaaaagttagtaagttatggtgttttttggtagttttggacgatttgttgtgtggagagagttaagattaggtgtgtgttttgtttttagtgaagaggagtgttttttaaggattggggtgtattagaattatatagggtgttttttttttttttttttttttaatagagttttgttttgttatttagattggagtgtagtggcgcgattttggttgattgtagtttttgtttttcgggttttagtgatttttttgttttagttttttgggtagttgggattatagatgtatgttattatgtttggttaatttttgtatttttagtagagatgggggttttattatgttggttagattggtttcgaattttcgattttaggttttttaaagaattgggattataggcgtgagttattgtattcggtttatagggtattttttaagaatttagaggatttaatataatgattataatttggtagatttgggttatagtaagtgatttaaagaagggtaggaagagaggttaagagatttagttttaacgagtttagtgttgtattaaagatggttgtataaaatgaaggtagtggtgttgatatggagagtggatagatgtgagtaaagtttttgttatggaatattttatttatgtgtgggaaggaatagggaagatgggtt

SEQ ID NO: 232 - DNA, 8666 bp, Artificial Sequence
  chemically treated genomic DNA (Homo sapiens)
ttgtagggttttttttagtttaaagaaagtaattaggtgtttttattgtgttatgatttttatttttagttgggttttttagtttggttttaaagaataaaataaaaggtttttttgtttgagttttatttaatttattttttttatttataagaggtattttaaatttttacgatttttaaattttttaatcgattattttatttttattttgtaaataagttaatttttttatttatagaaggaagtgttttaatttttttttcgttttgatttttttttttttttaaatttatgtattttttgtgataaaatttataattatcgttgtattttgagttttatttttttattatttttgagggattttaagtttttaaaaatattttattttgtttgtgtatttaattttttttttatttttttttaatttttttttttttttatttggtatttgtttttttaggtatatgtgtgtttaggttttttttattttttatttgttttattttatggtatagggttttgaattattataattaagttatgaaagagtagttaacgtagtgtttttatttttttgttattttattattttagttttttttttggttttttgaggagttttttataggttggtttttaggaataagtttaaatgaattatttttagtttttttaaatttttatgtttttgtatatttttttatttttgtttagaatattttttttttttttttttatttttaaatttttatattattttttaagattgggattagtttttagtattcggaagtttttgtttattagagataaatgagaatgagtttggttatttttttatttttttgtattattttgtgttttattttgtttttttaagagtattatatgttttatttaatttttaaataattgtttgaggtaagtatagttattattttaattatgtaaatgagaaaatagaggtttagatatgttgagtaattttgataaaagttaaagaattaataagtggaatagttgaggtttgaattttggtagtttgattgtagagatattatgtttgatttatttttttttgtttttattttatgtttgtttttagtttttgagtttgttgaatgaatgaataggtggtagtttttttttgttataagattgattagaattaagataggtttaaattttacgtgtagaatttttaaaattgtaaaggtagtgtaaatttaaaaaaagaatggtatttttaggaaagaggaaaagtaagtgtgagaataataataataataattaataaattttagtaaatttagtaaatgtagtaaatttttatattaaaagtttttggatatatattattatattttatggttatatgaaatatattataattttattttgtatataggaaatttgagattggtataaggagtatagagatttaggattttatatttttatttttttaggattttgtattttaggtcgatatgtatgagtaaattgggagtataatgggttttttaatagaaaaattaggaaagtttttttattattattaattatttatataatatttttttaattttattattatttatattttaagttttagagtatatgtgtataatgtgtaggtttgttatatatgtatatatgtgttatgttggtgtgttgtatttattaatttattatttagtattaggtatattttttaatgttatttttttttttttttttttatataagatttataatggataatggattttaatttttagagtaaaatggttttatttaaggatgttataatttttttagagttttattgtaagatatgagatatatatatttaaaatttgtttttggtatttttaaagtagttaatttttatatttgtttataatgtatttaaatgttgtttttatatggttgtattttttattttttttattaatagttatatatattttttataagagttgaaagagtttttgatgtaggaatttatggtagagttttagagaaatttttgaatttattgaaagttttatttagaaatatatgtgtaagtgaatatattttttttaaaaaaaattattatttatttttttttttgagaagaaggtatttattttaatagatttttgaaggagtttattttttttatttttttatttttattaagaattattgtaggtcgggtacgatggtttatgtttgtaattttagtattttgggaggttaaggtgggtggattatttgaggttaggagttcgagataagtttagttaatatagtgaaatttcgtttttattaataatataaaaattagttgggtatggtagtatgtgtttgtaattttagttattcgggaggttgaggtaggagaattgttcgaattcgggaggcggaggttgtagtgaatcgagagagatcgtgcggtgttattttattttagtttgggtaatagagcgaaattttattttaaaaaaatatataaaataaataaataaaaagaaagaattattgtattagtgatggaaatgtgtttttttttttttattttggtaattatttttttttttttttattataaaatattttaaattaaattaaaataattttatttatcgatagtttgaattttttttattattgttatatagttaattgagaggtatttcgaggaaaatataaatggtatagtaatgtattgtagattttaataatatatttgatattttaaattgtttttattggttttattttaaaaattatatgttttaaaattaagtagatattaaaagtataagatatattgggtttataaggtttaagttaattagggattgaaatataatttttaaatagagttggattatttagtaggtagattaagtatgtgtttaaggtattagtaaagtttgagtaatttattttttaaaacgtagtatatgtttttgataagtttaaaaagtagtagttataggaaaaattagaatttttatttttttgcgtttgttatattttttagtgttgtttaatttttttttgtaagtgagggtggtggagggtgtttataatttttttagggagtaagttttttttggttttttttttttttttttttttttttttttttgagattaagtttcgtttttgttttttaggttggagtgtaatggcgcgatttcggtttattgtaattttcgtttttttttgggtttaagcgatttttttatattagttttcgagtagttgggattataggtatgcgttattaagtttcgttaattttgtattttttagtagagatagggtttcgttatgttggttaggtttgtttcgaatttttggttttaggtgattcgtttgtttcggttttttagaatgttgggattatagacgtgagttatcgtattcggattttttttttatgtaatagtgataattttatttaaagtatttttttttttttttgagtcggagttttattttgttatttaggttggagggtggtggcgcgatttcggtttattgtaatttttgtttttcgggtttaagcgatttttttgttttagttttttgagtagttggaattatatacgtgcgttattatggttagttaatttttgtatttttagtagagacggggtgttattattttggttaagttggtttcgaatttttgattttaggtgatttgttcgtttcggttttttaaagtgttgggattataggtgtgagttatcgcgttttgttttaaagtattttttttttatgttttaaaataagattgtaagttagtttttaaagcggataatttaagagttaataggtattagtttaggatgtgtggtattgtttttaaggtttatatgtattaatatattatttaaatttataataatttttataaagtagggggtatttatatttttttttttttttataattacgaaaaatgtaaggtatttttagtaggaaagagaaatgtgagaagtgtgaaggagataggatagtatttgaagttggtttttggattattgtgtaattttgtttttagaatattgagtattttttttggtttaggaattatgattttgagaatggagttcgtttttttaatgattttttttttatttttttatttgtttataggtagaattttttttcgttcgtattaaataaattttatttttttagagtttgtttttatattaggtaatgtatacgtttgagaaatttttgttttagatagtcgttttatacgtaggaggggaaggggaggggaaggagagagtagttcgattttttaaaaggaattttttgaattagggtttttgatttagtgaatttcgcgtttttgaaaattaagggttgagggggtagggggatattttttagtcgtataggtgatttcgattttcggtggggtttttataattaggaaagaatagttttgtttttttttatgattaaaagaagaagttatattttttttatgatattaaatatttcgatttaatttggtagttaggaaggttgtatcgcggaggaaggaaacggggcgggggcggatttttttttaatagagtgaacgtatttaaatacgtttttgttggtaggcgggggagcgcggttgggagtagggaggtcggagggcggtgtggggggtaggtggggaggagtttagttttttttttttgttaacgttggttttggcgagggttgttttcggttggtgttttcgggggagatttaatttggggcgattttaggggtgttatattcgttaagtgttcggagttaatagtatttttttcgagtattcgtttacggcgtttttttgtttggaaagatatcgcggtttttttagaggatttgagggatagggtcggagggggttttttcgttagtatcggaggaagaaagaggaggggttggttggttattagagggtggggcggatcgcgtgcgttcggcggttgcggagagggggagagtaggtagcgggcggcggggagtagtatggagtcggcggcggggagtagtatggagttttcggttgattggttggttacggtcgcggttcggggtcgggtagaggaggtgcgggcgttgttggaggcgggggcgttgtttaacgtatcgaatagttacggtcggaggtcgatttaggtgggtagagggtttgtagcgggagtaggggatggcgggcgattttggaggacgaagtttgtaggggaattggaattaggtagcgtttcgatttttcggaaaaaggggaggttttttggggagtttttagaaggggtttgtaattatagatttttttttggcgacgttttgggggtttgggaagttaaggaagaggaatgaggagttacgcgcgtatagatttttcgaatgttgagaagatttgaaggggggaatatatttgtattagatggaagtatgttttttattagatataaaatttacgaacgtttgggataaaaagggagttttaaagaaatgtaagatgtgttgggattatttagtttttaatttatagatatttggatggagtttattttttttattaggagggattattagtggaaatttgtggtgtatgttggaataaatatcgaatataaattttgatcgaaattatttagaagcggtcgggcgcggtgttttacgttttgtaatttttttattttgggagattaaggcggggggaattatttgaggtcgggagttcgagattagtttggttaataggtgaaatttcgtttttattaaaaatataaaaagtagtcgggggtggtggtaggcgtttgtaattttagttattcgggaggttgaggtaggagaatcgtttgaattcgggaggttgaggttgtagtgaatagcgagatggagttattttattttagtttgggtgatagagtgagattttgtcgaaagaaagaaagagagaaagagagagagaaaaattatttagaagtaattatatattgtgtttatttttaattgagtagggtaaataaatatatgtttgttgtaggaatttaggaaataatgagttatatttatgtgattattttagaggtaatatgtagttattattttgggaatatttgttaatatttttgtttttttattatttttagtttatttgatatagtttatttgtgataagagtttttaattttttatttttgaatagaggtgttttttttttttttatttttgttttgtgagggagttaggggaggatttaaaagtaattaatatatgggtaatttagtatttttaaaattttgttaatagtttgaattcgggagtttggttttgtagttttataatattttagaagagattttatttgtttaaaaataaaaaggaaaaagaaaagtggatagttttgataatttttaatggagaagggagaagaatatgtagaaaaggggaaatgatgttggtttagaattttaattatattggtgtttaatataggaatatttatttatataatattttaaagtattaaatttatattagtatattattaaatggatatattattaaatgggtttaagtattttatatattttaatttaattgatttattttttttttgttttggatttttattatgatttaaatatttatatatgggttattttttagattttttatattatgaaatataagaaaaatttttaaggttagttttatgattaagacgaaggattttattgaatatataaaataataaatatattgtaatattttgtttttttttttgtagttgtaatttggtttgtttatattttttttttgtttttttgaaaattgagttagttttatttttttaggataggatttaataattataatataatttagtataattttttgatttaggtaaattatgtaatttgtgtttagtatgaaatgtatttaaaaataagtaatttttttttaatattattatttttaaattaatataataaataatagttattttaaaataaattgtttatttttattatgtagtatttaaattttaaggttgttatgattgtagatagtattttaaaatttttttttggaaatggttttgtttttaagatgatttaggaattaaagaggtgattattttttgtttaatgaatttttaaattataaatttgggaagtgttttagttttttattgttgttgttataaattattataaatgtgttagttaaaataaatataaaattattattttatagttttagagattagaagttaaaaatgggtttataaggttttattttttttggaaattttaaggggtaatttgtttttttgttttttttagtttttagtgattattaaattttttggtttatggtttttgtattttttttgtggtttgtgtttttatttttgtattttttttttgattgtgattttttaataaaaatatttggggttatgttgggtttattttgaaaattttggataattttttttaagattattaattaaattatatttgtaaagttttttttgttatataagttaatgtattaaaagtttttgaggattaggatatagatattgggggtgggggggtattatttagtttattataggaaggaattttagggttaattaaattagtttttttattttatatttgaagaaattgaagttttggaattggagagtattatgttaaatgaaataagttaaatatagaaagataaatattatatgtttttatttatttgtgaaatataaaataattatatttttagtagtaaagagtagaatggtggttattagagttggggggtgggaggaatggggagatggtaattaagatataaagttttagttaagatgggaggaataagtttgattgttttttttgagatgtgttttatagtatgatgaatatagttaaatagtaaattttaaatgtttttatttgataaaaatgttaaatatttgagatgatggataggttatttagtttgatttaataattttttattgtgtttaaagattataattttatattgtattatataaatatatataattgtattattttaatatataattttaaaattaatataatgaaaaagaaattgaagtttaatatttttagaagttaagtgtaatttaaaagttttgtgagaatttgttttaataaataaataagttttttttttttaataattattatattttgcgtttggatatatagtagtgaataaaaaaaaaaaaaaaaaaaaaaatttttaggtttaatataattttaggaagaaattttagtagttgtattttaggggaaatataggaagttagtttggagtaaaagttagtttgtttttgtttttttgttattttgttcgtgttttatagtgttttttgtttgtgacgatagtttcgtagaagttcggaggatataatggaatttattgtgtattgaagaatggatagagaatttaagaaggaaattggaaattggaagtaaatgtaggggtaattagatatttggggtttgtgtgggggtttgtttggcggtgagggggttttatataagtttttttttcgttatgtcggtttttattttggttttgattattttgttttttttggtagg

SEQ ID NO: 233 - DNA, 8666 bp, Artificial Sequence
  chemically treated genomic DNA (Homo sapiens)
tttgttagagagaatagaatggttagagttagggtgggggtcggtatgacggaaaggaagtttgtgtagagtttttttatcgttaagtagatttttatataagttttaggtgtttaattatttttatatttgtttttagtttttaattttttttttgagttttttatttattttttagtatataatgaattttattatatttttcgaatttttgcggagttgtcgttataggtagagagtattgtgaggtacgggtaaaatagtaaaggggtagggatagattgatttttattttaggttaattttttgtattttttttgagatataattattgaaatttttttttgaaattatgttaggtttggagatttttttttttttttttttttttgtttattgttgtatatttaagcgtagaatgtggtaattgttaaaaagagaaaatttgtttgtttgttaaaataaatttttataaaatttttaagttatatttagtttttgggaatgttgaattttaattttttttttattatattagttttaaaattatatattgggatagtatagttgtatatatttatgtggtataatatgaagttatgatttttgaatataatggggaattattaagttaagttaagtaatttatttattattttaaatatttgatatttttgttaaatgagagtatttgggatttattatttagttatatttattatgttatgaaatatattttaaaaaaaataattaaatttattttttttattttaattgaggttttatattttgattattatttttttattttttttattttttagttttagtaattattattttattttttattgttaagaatgtaattgttttatattttatagataagtgagaatatgtgatatttgtttttttgtgtttggtttattttatttagtataatgttttttaattttaaaattttaatttttttaagtataaaataagaaggttagtttaattaattttaaaatttttttttgtggtaggttgaataatgtttttttatttttaatgtttatgttttaatttttaaaaatttttaatatattaatttatgtggtaaaagaggttttgtagatgtgatttaattaatggttttgagggagattatttagaatttttagggtgggtttaatataattttaagtgtttttattagagggttatagttagagagaagatataagaatggaagtataggttatagagaaaatatagagattatgagttaaggaatttgatggttattagaagttggaaaagataaggaaatagattgttttttagagtttttaaaaggaatgaaattttgtggatttatttttgatttttgatttttagaattgtaaaataataattttgtgtttgttttagttaatatatttgtgataatttgtaatagtagtagtaggaaattaaaatattttttaggtttatgatttgagagtttattaaataagagatggttatttttttggtttttaaattattttggaaataaagttatttttagagaggaattttaaaatattgtttgtagttatagtaattttaaaatttgagtgttgtatggtggaagtagataatttattttaggataattgttatttgttatattagtttgaggatggtggtgttaaagaggagttatttatttttaggtatattttatattaaatataaattgtataatttgtttaaattaaggaattatattaaattatattatggttattaaattttgttttgagaaagtgaaattgatttagtttttaaagagataaagagaaagtataagtaaattaaattgtagttataaaaagaaagataaaatgttgtagtatatttattgttttgtgtatttaatgaagtttttcgttttggttataaaattagttttaaaggttttttttatattttatagtatgaaaaatttaaaaagtaatttatatgtaaatatttaaattatgatagaaatttaaagtaaaaagaaaatgaattaattgaattaaaatgtgtaggatgtttaaatttatttgataatatatttatttgataatatattaatatgaatttagtattttaaaatgttatataaataaatgtttttatattaaatattaatgtagttaggattttaagttaatattatttttttttttttatatgttttttttttttttttattaaaaattgttaaaattatttattttttttttttttttttgtttttaaataaataaggttttttttaagatattgtaggattataaagttaaattttcgggtttaagttgttggtaaaattttagagatgttaagttatttatgtattaattatttttaaatttttttttaatttttttataaaataggagtagggagaggagaaatatttttgtttaaaaatgaggaattgaaaatttttattataaataaattatattaagtaagttaaagatagtaaaagagtaaaaatgttagtagatatttttaaaatggtaattatatattatttttggaatgattatatgaatgtggtttattattttttaagtttttatagtaaatatatatttatttgttttatttagttaaaaataaatataatatgtagttgtttttgaataatttttttttttttttttttttttttttttttttcgataaagttttattttgttatttaggttggagtgaagtggttttatttcgttgtttattataattttagtttttcgggtttaagcgatttttttgttttaatttttcgagtagttgggattataggcgtttgttattattttcggttattttttgtatttttagtagaggcgaggttttatttgttggttaggttggtttcgaattttcgattttaggtgatttttttcgttttgattttttaaagtgaagggattataaggcgtgaggtatcgcgttcggtcgtttttgaataatttcgattaaaatttatattcgatatttattttaatatatattatagatttttattgataattttttttagtaagaaagataagttttatttaggtatttgtgaattggaggttaagtagttttagtatattttatatttttttaagattttttttttattttaaacgttcgtaaattttgtatttgataaagagtatatttttatttaatataaatatgtttttttttttagatttttttagtattcgagagatttgtacgcgcgtggttttttattttttttttttggttttttaagtttttagggcgtcgttaggaggaggtttgtgattataaattttttttgaaaattttttaggaagtttttttttttttcggagaatcgaagcgttatttgattttaatttttttgtaaatttcgttttttagagtcgttcgttattttttgttttcgttgtagattttttatttatttggatcggttttcgatcgtaattattcggtgcgttgggtagcgttttcgtttttagtagcgttcgtattttttttattcgatttcgggtcgcggtcgtggttagttagttagtcgaaggttttatgttgtttttcgtcgtcggttttatgttgtttttcgtcgttcgttgtttgtttttttttttttcgtagtcgtcgagcgtacgcggttcgttttattttttggtgattagttagtttttttttttttttttttcggtgttggcggaagagtttttttcgattttgttttttaaattttttggagggatcgcggtatttttttaggtaaggggacgtcgtgagcgagtgttcggaggaggtgttattaatttcgagtatttagcgaatgtggtatttttgaagtcgttttaggttgggtttttttcgggggtattagtcggaagtagttttcgttagagttagcgttggtaaggaaggaggattgggtttttttttatttgttttttatatcgtttttcggtttttttgtttttagtcgcgttttttcgtttgttagtaaaggcgtgtttgagtgcgtttattttgttaaaaagaaattcgttttcgtttcgtttttttttttcgcgatataatttttttaattgttaaattgaatcggggtgtttggtgttatagggaaagtatggtttttttttttaattataagaaaaagtaaaattatttttttttagttgtgagagttttatcgagaatcgaaattatttgtacgattagaaagtgtttttttatttttttaatttttgatttttaggagcgcggggtttattaagttagaaattttagtttaaaggattttttttggagagtcggattgtttttttttttttttttttttttttttttgcgtgtaaaacggttgtttggggtaagggttttttagacgtgtatattgtttggtataagagtagattttgaaaagatgaggtttatttaatacggacgggggagaattttgtttgtaggtagataggaaaatggggagggagttattggaaggacggattttatttttaaagttataatttttagattagaaaaagtgtttagtgttttagaagtagagttgtatagtgatttaaagattagttttaaatattgttttgttttttttatattttttatattttttttttttattgaaaatattttgtatttttcgtaattataaagggggaagggaatatgagtgttttttgttttataggggttgttgtgagtttaaatgatgtattaatatatataagttttaagaatagtgttatatattttaagttaatatttgttagtttttgaattattcgttttgaggattggtttgtaattttgttttgaggtatagaaagaaaatgttttggagtaggacgcggtggtttatatttgtaattttagtattttgggaagtcgaggcgggtagattatttgaggttaggagttcgaggttagtttggttaaaatggtgatatttcgtttttattaaaaatataaaaattagttggttatggtggcgtacgtgtgtaattttagttatttaggaggttgaggtaggagaatcgtttgaattcgggaggtagaggttgtagtaagtcgagatcgcgttattattttttagtttgggtgatagaatgagatttcgatttaaaaaaaaaaaaaaatgttttggatagaattattattattatataaaaggaaagttcggatgcggtggtttacgtttataattttagtattttgggaggtcgagataggcggattatttgaggttaggagttcgagataagtttgattaatatggcgaaattttgtttttattaaaaaatataaaattagcggggtttggtggcgtatgtttgtaattttagttattcggaggttgatgtaggagaatcgtttgaatttaggagaaggcggaggttgtagtgagtcgagatcgcgttattgtattttagtttgggagataagagcgaaatttggttttaagaaaaaaagaaagaaagaaagaaagaaagattaagaagaatttattttttgaaaagattatgggtattttttattatttttatttataaagaaaagttaaatagtattaaagagtataataagcgtaaggaggtaaaagttttaattttttttgtgattattattttttaagtttattaaaaatatgtattacgttttaaaaaatggattgtttagattttgttgatgttttaagtatatgtttaatttgtttattggataatttagttttgtttaaaagttatattttaatttttggttgatttaaattttgtagatttagtatattttgtatttttagtgtttgtttgattttaaaatatgtagtttttaaaatgaagttaatgaaaataatttgggatgttaagtatgttattaaaatttataatgtattattgtattatttatatttttttcggggtattttttaattagttgtgtagtaatgatagggaaaatttaaattatcgataaataaaattattttagtttagtttaagatattttatgatggaggaggaagaaagtggttgttaggatgggagggagggaatatatttttattattaatataatggttttttttttttgtttgtttgttttgtgtgtttttttgagatggagtttcgttttgttgtttaggttggagtgaaatggtatcgtacgatttttttcggtttattgtaattttcgtttttcgggttcgagtaatttttttgttttagtttttcgagtagttgggattataggtatatgttgttatatttagttaatttttgtattattagtagagacggggttttattatgttggttaggtttgtttcgaatttttgattttaggtgatttatttattttagttttttaaagtgttgggattataggtatgagttatcgtgttcggtttatagtggtttttaatgggggtgggagagtgggaagagtaggtttttttaagagtttgttgaaataaatattttttttttaaaaaagaaagtaggtaatgattttttttaaaaaagatgtgtttatttgtatatgtatttttagataaaatttttagtgaatttagggatttttttgaaattttattatggatttttatattaagaatttttttagtttttgtgaaaaatatatatagttattggtgaagaagatgggagatgtaattatataaaaataatatttggatgtattataaataggtgtaaaagttgattgttttggaaatattaagaataagttttagatatgtatattttatattttgtagtagagttttggaaggattatggtatttttgggtggggttattttgttttagaaattgaagtttattatttattataaattttatgtaggggggaggggggagggatagtattaggagatatatttaatgttaaatgatgagttgatgggtgtagtatattaatatggtatatgtatatatatgtaataaatttgtatattgtgtatatgtattttaaaatttaaagtataaataataataaaattaaaaaaatattatgtaaataattaataatagtgggaaaatttttttagtttttttgttaaagagtttattatatttttagtttatttatatatatcgatttgaggtgtaaaattttagaagaatgaaaatataaagttttggatttttgtgttttttatgttagttttagattttttatgtgtaaaatgggattataatatattttatgtggttataaaatatgataatgtatgtttaaaagtttttaatgtaaaaatttattatatttattaaatttattaaagtttgttggttattgttattattatttttatatttatttttttttttttttgagaatgttattttttttttagatttgtattgtttttgtagttttgaaaattttatacgtgaaatttaaatttgttttaattttgattagttttataataaaaaaagattattatttgtttatttatttaataagtttagaaattaagggtagatatggggtgggggtagaggggagtaggttaaatatagtatttttatagttagattgttagggtttaaattttaattgttttatttattggttttttaatttttattaaagttatttaatatgtttgggtttttgtttttttatttgtatgattaggataataattgtatttgttttaaatagttgtttagggattaaatgaagtatgtaatgtttttagaagagtaaaataaagtatagaatgatataagaaaatgaaaaggtgattaaatttatttttatttgtttttagtaggtaaaggttttcggatgttgagagttgattttagttttgaagaatgatgtgagagtttaaagatggaaaagaaggagaaagatattttaggtagaggtaagaggatgtgtaaaggtatagaagtttaggaaaattgaaagtaatttatttagatttatttttgaaaattagtttgtgaaggattttttagagagttaaaagaaaaattaggataatgggatggtaaggaagtggggatattgcgttgattatttttttatagtttggttgtgatagtttaaggttttatgttatgaagtgaggtagatggaaggtggaggagatttgagtatatatatatttggaagggtaagtgttaagtgaagagaagggaaagttagaaaagaataaaagaaaagttaagtatataggtaagataggatatttttgaggatttgaggttttttaaaaataatgaagaaatagaatttaaagtatagcggtggttatagattttgttataagagatatatagatttgggagggagaaaaggttagaacggggaggaagttgaggtatttttttttatgaatgaggaggttagtttgtttgtagagtgaaaataagatggtcggttaggaagtttgagaatcgtaaaggtttggaatattttttatgagtagagaggatgggttgagtaagatttagatagagaagttttttgttttgttttttaaaattagattggagaatttagttgagggtggagattatgatatagtagggatatttgattattttttttaaattaaagaaagttttgtag

SEQ ID NO: 234 - DNA, 4101 bp, Artificial Sequence
  chemically treated genomic DNA (Homo sapiens)
ttttttattttttattgttatttatttagcgttgtgtagtagtttagttgcgtgtttgtcgggaggggttgttaagtgttttgtttattggttgtttttcgaatttttgttattttacgtataaatatatttatatattttttttgtttagtttatatattgagttattcgtatatgcgagtatatttttttttttttttttattttttcggtttttgatttttataagtttatggaatatttttggaaagacgtttttgatttagtagggtaggtttgttttgatttttttttttgtagttttagtattttgagaaagtaatttatttttttggttagtgtttgtattttagtagggagatgaggattgttgttttttatgggggtatgtgtgtgtttttttttttttttaggatttgtaggattttttgtgttatttgtatataatttggtaggtttatattttttaagagttttatgaagtgttttttgtatgtgttttaaaaaggtatttgaaaattgaaagtgtgatttatggaaattaaattatttgtaaaaaattgttttggaaagtaatgattgttggttataaagggaaatatttgcgatgtatttaatgtgtttttaattttttatttgttgataatttatagttattaatgttaaattcgattttggttttagttatatttgtatattgtttaataatggtttatttttgtaagaattagataaaatgtatatttgatataaaatagttaaaaatgtaatttttagtaatagtaagtttggtatttagatagattatgaatatttcgttagatattttgttgggtgtttgggatagtaattaaaataaagtattgatagttgtattagagtttattaggttgtagtaaaggaagtttatttaaaagtataaattatttaagattatagacgtatgatatattttatttattttttgtttttttaatatgtatatatatatatatatatatatatatatatatatatgtgtgtgtgtatgtgcgtgtgtatgtttaatttttaatttagttaaaaatttttttttatttgttttttatttggatatttgattttgtatattttagtttaagtgaatcgagaagatcgagttgtaggattaaaggatagatatgtagaaatgtattttaaaaatttgttagttggattagatcgataatgtaatataattgttaaagttttggttcgtgatttgaggttatgtttggtatgaaaaggttatattttatatttagttttttgaagttttggttgtataattaatttgtggaaggtatgaatatttatgtgcgttttaattaaaggtttttttgaattattttttatatgagaatttttaatgggattaagtatagtattgtggtttaatataaatatataagttaggttgagagaattttagaaggttgtggaagggtttatttattttgggagtattttgtagaggaagaaattgaggttttggtaggttgtatttttttgatggtaaaatgtagttttttttatatgtatattttgaattttcgtttttttttttttagatgttttttgttagtttttttagttgttaaatatagttgtttgtggttggttgcgtatgtaatcgtatattttattttatttgttttatttcggttatagtgtagttttttttagggttattttatgtatatattacgtatttttagttaacgaggagggggaattaaatagaaagagagataaatagagatatatcggagtttggtacggggtatataaggtagtatattagagaaagtcggtttttggattcgtttttcgcgtttattttaagtttagttttttttgggttatttttagtagattttcgtgcgttttcgttttttggtcgtgaaatttagtttttatttagtagcgacgataagtaaagtaaagtttagggaagttgttttttgggatcgttttaaatcgagttgtgtttggagtgatgtttaagttaatgttagggtaaggtaatagtttttggtcgttttttagtatttttgtaatgtatatgagttcgggagattagtatttaaagttggaggttcgggagtttaggagttggcggagggcgttcgttttgggattgtatttgttttcgtcgggtcgttcggttttatcggattcgtaggttttcggggtagggtcggggttagagttcgcgtgtcggcgggatatgcgttgcgtcgtttttaatttcgggttgtgttttttttttaggtggttcgtcggtttttgagttttttgttttgcggggatacggtttgtattttgttcgcggttacggattatgattatgattttttatattaaagtatttgggatggttttattgtattagatttaagggaacgagttggagtttttgaatcgttcgtagtttaagatttttttggagcggtttttgggcgaggtgtatttggatagtagtaagttcgtcgtgtataattatttcgagggcgtcgtttacgagtttaacgtcgcggtcgtcgttaacgcgtaggtttacggttagatcggttttttttacggtttcgggtttgaggttgcggcgttcggttttaacggtttggggggtttttttttatttaatagcgtgttttcgagttcgttgatgttattgtattcgtcgtcgtagttgtcgttttttttgtagttttacggttagtaggtgttttattatttggagaacgagtttagcggttatacggtgcgcgaggtcggttcgtcggtattttataggtattcgcgttcgcgtcgttcgtcggggtggtcgtcgcgttcggtaggagggagggagggagggagggagaagggagagtttagggagttgcgggagtcgcgggacgcgcgattcgagggtgcgcgtagggagttcggggcgcgcggtttagttcgggggttttgcgtgtagttcgcgttgcgtttagagttaagttttttcgtcgggtagttgaaaaaaacgtattttttatttatttatcgttcgtgcgagaggtagattcgaaagttcgggttttttaataaaatatacgttggaaaattagataaagtagtagttatttgtgggggaaaatatttttaggtaaataaatacggggcgttttgagttatttgggaaggtttcgtttttggtatttaaagttgggggtgtttggagttagtagagtttagtagagttttatttatttttttaatgtttttgtttaatgtgttttttaaatttttttttatttagattatttgattggaaatatgttagttatgatgatgattttttgggaagcgatttttgttattcgttttttttttttttttattttacgttttggggttttagagagcgattgggagttgaatgggtttgatttcggagttagttggttgagttcgcgttggagcggattgttggtatgtgatttttgatagtcggaaatttgtaggtgtttcgcgagtttaaaataagttatatggaagtataagtgtttaaaaataattttttgttagtttagtgataagtttgttttattcggggagaatgtttcggagtggcgtgcgggttagttagggtttgcgtttcgtagttattgtggaaggagcgcggtcggtttaggatataggagattattttgtgattttaatggcgaaggttgtgtgtttttattttaatttttttttttataagaattgttttttttttttttttttttttttttatttttttttgtttagtttttttttttgttttttgttttttgtttttttgatgggtttgtagagggattaggtgggcgtttttggtgaatatttttttaggtggttataggataggtgtatttcggattgggtttggaagttttagggcgttatatggttgggttttgaattaggtattttttaattgtatattggtattcggattggtgtttttatatttttttgttttgtaagtcgtggattagtttttgtttagtattttgtttttagggatatttatagtagaaggaaggggattaaagtgtagtttgg

SEQ ID NO: 235 - DNA, 4101 bp, Artificial Sequence
  chemically treated genomic DNA (Homo sapiens)
ttaaattgtattttagtttttttttttttgttataaatatttttggaaatagaatattgaataaaaattggtttacggtttataaggtagaaagatatagggatattagttcggatattagtgtatagttgggaaatgtttaatttaggatttagttatgtggcgttttgaagtttttaaatttagttcggggtatatttgttttgtggttatttaggaaggtgtttattagaagcgtttatttaatttttttgtaggtttattaggaaaataaaaaataaaaaataaaaggagaaattgggtaagagaaaatgggagggagaggagagggagaaagaataatttttgtagggaaaaaaattaaaatgaggatatataattttcgttattgaagttataaagtggttttttgtgttttggatcggtcgcgttttttttatagtggttgcgaggcgtagattttggttgattcgtacgttatttcggggtatttttttcgggtgggataggtttgttattgggttggtaggagattatttttaagtatttgtgtttttatatggtttgttttaaattcgcgggatatttataaattttcggttgttagaagttatatgttagtaattcgttttagcgcggatttagttagttaatttcgaaattagatttatttaatttttaatcgttttttaaagttttaggacgtggggtggggaggaggggaaagcgggtgataggaatcgttttttagaaagttattattatagttgatatatttttaattaaatagtttagatgaaaggaaatttggggagtatattaaataaaaatattaaaaggataaataaaattttgttgagttttgttaattttaaatatttttaattttaaatgttaagagcgagatttttttaagtgatttaaagcgtttcgtgtttatttgtttggaggtgtttttttttataaataattgttgttttgtttggttttttaacgtgtgttttgttaggaagttcgggttttcgggtttgtttttcgtacggacggtaagtgggtggagagtacgttttttttagttgttcggcgagagaatttgattttgaacgtagcgcgggttgtacgtagaattttcgggttgggtcgcgcgtttcgggttttttgcgcgtattttcgggtcgcgcgtttcgcggttttcgtagttttttaggttttttttttttttttttttttttttttttttttgtcgggcgcggcggttatttcgacgggcggcgcgggcgcgggtatttgtagaatgtcggcgggtcggtttcgcgtatcgtgtagtcgttgggttcgttttttaggtagtagggtatttgttggtcgtggggttgtaggaaaggcgatagttgcggcggcgggtgtagtagtattagcgggttcggagatacgttgttgagtggggggaaattttttaggtcgttggagtcgaacgtcgtagttttagattcggggtcgtaggggaggtcggtttgatcgtagatttgcgcgttggcggcggtcgcggcgttgaattcgtaggcggcgttttcggggtagttgtatacggcgggtttgttgttgtttaggtatatttcgtttaggggtcgttttagggggattttgagttgcggacggtttaggggttttagttcgtttttttggatttgatgtagtagggttattttagatgttttggtgtggagggttatggttatggttcgtggtcgcgggtagggtgtagatcgtgttttcgtagggtagaaggtttagaaatcggcgggttatttggaaaaagagtatagttcgaggttagaggcgacgtagcgtatgtttcgtcgatacgcgagttttggtttcggttttgtttcgggagtttgcgggttcggtgaagtcgggcgattcgacgggagtaagtgtagttttaggacgaacgtttttcgttagtttttgggttttcgggtttttaattttaagtattggtttttcgagtttatatgtattataaaggtgttggaggacggttagggattgttgttttgttttgatattggtttaaatattattttaggtataattcgatttggagcgattttaaagagtagtttttttgaattttattttatttgtcgtcgttgttggatagaggttgagttttacggttagggggcgggggcgtacgaggatttgttaaaggtggtttagggaagattgggtttaaaataaacgcgaaagacggatttaggggtcggttttttttaatgtgttgttttatgtgtttcgtgttagatttcgatatatttttgtttgtttttttttttgtttgatttttttttttcgttggttagaaatacgtagtgtgtatataggatgattttggggaggattatattgtaatcgagatagggtagatagaatggggtgtgcggttgtatacgtagttagttatagatagttatatttagtagttgggggaattgatagggggtatttgaggggaagggggcggagatttagggtatatatataggaagagttgtattttgttattaggagaatgtaatttgttaggattttagtttttttttttgtaaaatgtttttaaagtagatagatttttttataattttttgagatttttttagtttgatttgtgtgtttatgttggattatagtattgtatttggttttattaggaatttttatgtgaaggatgatttagaaaaatttttggttagggcgtatatgggtgtttatgttttttataggttggttatgtaattaaaattttagaaaattgaatataaaatgtgatttttttatattaaatataattttaggttacgaattaaagttttggtaattatgttatattgtcggtttggtttagttaatagatttttaaaatgtatttttgtatgtttattttttagttttataattcgattttttcggtttatttgggttaggatatgtagaattaaatatttagatgaaaaataaatagaaaaaagtttttaattgaattaaaagttaaatatgtatacgtatatatatatatatatatatgtgtatatatatatatatatatatatatatatatattaaggagataaaaaataggtgaagtatattatgcgtttataattttggatagtttatatttttgaataaattttttttgttgtagtttaatagattttgatataattattaatattttgttttaattgttattttaaatatttaatagagtatttgacgaagtgtttatggtttatttaaatgttaagtttattgttattaagagttatatttttgattattttatattaagtatatattttatttaatttttataaaaatagattattgttggataatatgtaaatgtagttgaagttaaaatcgagtttagtattaatgattatagattgttagtaaataaagggttaaaaatatattaggtgtatcgtagatatttttttttatggttagtaattattattttttaaagtaattttttatagatgatttaatttttataaattatatttttaatttttaaatgtttttttaaaatatatgtaaaaagtattttatagggtttttaaaaaatgtgaatttgttaaattatatgtaaatggtataaagaattttataagttttgaaagaaaaaggagatatatatatatttttatggagaatagtaatttttatttttttgttaggatatagatattagttagaaaggtaagttgtttttttaaaatgttaaagttatagagagagaaattaaaataagtttattttgttggattaagaacgtttttttagaaatgttttatgggtttgtagaagttaagggtcgagagagtgagaaggaaggaaggaatgtgttcgtatgtgcgagtggtttagtgtgtgaattaggtagagagagtgtgtggatgtgtttgtgcgtggaatggtagggattcgggaagtagttagtaggtagggtatttggtagtttttttcggtagatacgtagttgggttattgtatagcgttggatgaatggtagtggggagtgagggg

SEQ ID NO: 236 - DNA, 2501 bp, Artificial Sequence
  chemically treated genomic DNA (Homo sapiens)
tatttgtggttttagttatttgggaggttgaggtgggaggattgtttgagtttaagaggttgaggttgtagtgagttgtgatcgtgttattgtattgtattttagtttgggtaatagagcgagattgtttaaaagaaaattaagtggttttttattgattgtgtgttataatttttttttttttttttttttagagatgagattttgttatgttagttaggttgattttgaatttttggttttaagtattttttttatttcggttttttaaagtattaggattataggtgtgagttattgtatttggttaattatgtgttatgattgttaaaagtaaatatatatatatagtgttgatttttaaaattttttttttaggagaagaagaaaaagaaatatagagataggaagttatttgattttgatagtttagattttgagagtgatataggtaagagggtaaggtatatattaaaagatagtaaggtagtaaagaagaagaaaaagaagaagaagtataagaagaagtataaggagtgagagtataaagagtgtagggggtggttgagagtaagaaattaggagttttgtgttttgagatttttggaaagatttaatagtgagaatatagttttttattttattaatttcgtttttatgggagatggtttttttttatgtaataggtaggtttgggagttagaggttaaaagtagttgtttgaatgagttgttgtttttttattatttttggtttttttgtaagtgaattttgtagtttatttatttatttatttaattttttttatttagtaggaggttttattattttttttagttgttattgttagagttggatttttgtaaaggagtttaggttagagttatagagattgttgtggaggtgagttcggttgtagttagagtgattggattttttttattggtttgttttgggttaattggtgggtgatttttgttgtatttaatatgggagtagagattggtagtaggaggggggaatatggtgagaagtggtgtttattttttttattttttttaatatagttttattatgttagaagtggtatttagcggttatagttagaaaatagtttgtagtgtgatttaatttgtgtattgtattttagtagattattgaattagatagcgaagttaagattattgttttattttgtatttattattgtgtgaattagttgattttattttaggtttttgtttaaatttttgttattaaatggaaatgtgtttggttttaaatttattgagttattttttttataatttttttttttgggtaatttatagatttaaagttattgagtttgtattagttgataaaaatatttaatatgttattttagattttggagagatgtttagtagaggtatagagttaaaggtattagtagattattgtttttttgggagattatttataagtttttttttttgtaatgattagatgttttttttttttagagttgattagagaagtagtaagaatttgtagttataagtattagtttggtgtataggttagtagtttttttggttagtggttatttttttttattattatggtataagtttgggttttgtgttttgaatttgaattttggaaagggagagattatagtattttatagagaatagttagatttaagagtttttagtgtaggatgggtttgaagtgatagtttaatagttaaatttggggaagttttattattgattgaattaggttatttgattatggagggggggtagtgtaaaggtaacgtgtaggtatagtttttttattattaaatgtgtaaggtgattagttgattaataggtttcgagattgtttattttagttttttatttagtgttttttttttagtaatttttaggtcgttatttttgtttattttttgatatataggataaattaagatttttagagttatgttattaaaggtaaaaaggtaattgggtggttttggttttgttttattgattttagagtattttatgagtgtagttaaaaaaaaaaaaaaaaaattatatatattatgggaattggaattggatttcggttagtggtatttgattttagaagaattcgtggatttgtataaaatgtagaggaagaaatgaggtaatgtggtgttgagtcgaggggtagtcgattggtagagtagtagttagtaatagtgtagttaggttatgttttttttttataagtgcgagtgtaaattgtagtgtcgtgggtgagtgtttggaaggaaagatagagtgagatggggggtggagttaggaatattattgcgagtattttatttttttttttttttgataattgttatttgagtatttattatgtgtcggttatatgtatgtatgtgtgtgtgtgtgtgtgtgtgtgtgtgtgtgtgtgtatatatatataattttttttttttgatatgtatagtaaatttttaagataggtat

SEQ ID NO: 237 - DNA, 2501 bp, Artificial Sequence
  chemically treated genomic DNA (Homo sapiens)
atgtttattttaaggatttgttgtgtatattagaaaaaaaaaattatgtatgtatatatatatatatatatatatatatatatatatatatatatatatatatagtcggtatatagtaggtatttaagtgataattattaggaggaagggagggtagaatgttcgtaatggtgtttttggttttattttttattttattttgtttttttttttagatatttatttacggtattgtagtttgtattcgtatttatgagaaagaggtatgatttgattgtattgttgttgattattattttgttaatcggttatttttcgatttagtattatattgttttatttttttttttgtattttgtataaatttacgaatttttttggggttaggtgttattgatcgggatttagttttagtttttatggtgtatgtggttttttttttttttttttaattgtatttatagggtgttttgaggttaataaagtagagttaaggttatttagttgtttttttgtttttggtaatataattttgggagttttggtttattttgtgtgttagagagtgggtagaaataacggtttgaaggttattgaggaagaagtattggatgggagattgaaatggatagtttcggagtttgttaattagttgattattttatatatttaataataaaagagttgtatttatacgttgtttttatattgttttttttttatggttaaatgatttagtttagttagtgatggggtttttttaggtttggttattgaattgttattttaggtttattttatattgaaagtttttgggtttggttgttttttgtgaaatgttgtagtttttttttttttagaatttaggtttagggtatagaatttaggtttgtattatggtggtgggagaaaatgattattggttaagaggattgttgatttgtgtattaggttagtatttatgattataaatttttattgtttttttaattaattttgagggaagagggtatttgattattataaaagggagggtttataagtgattttttaagaaggtagtgatttgttagtgtttttggttttgtatttttgttgggtatttttttaaggtttaaggtaatatattaaatgtttttgttagttaatgtaggtttagtgattttaagtttgtaagttatttaggaagaaggattataggaaaaataatttagtaagtttaaaattaaatatatttttatttagtgataggaatttaagtaaggatttgaagtagaattaattgatttatatagtagtaaatataaagtagaataatgattttggtttcgttgtttggtttagtggtttgttggaatgtaatatataagttaagttatattgtagattgttttttagttgtggtcgttggatgttatttttagtatagtagaattatgttaggaggaatgggaaaagtgagtattattttttattatgttttttttttttgttgttagtttttgtttttatgttggatgtagtagagattatttattagttggtttaggatagattaataggaagggtttaattattttaattatagtcgaatttatttttataatagtttttgtggttttagtttggatttttttataggaatttagttttggtagtggtagttggagagggtaataggattttttgttgaatgaaggaagttgggtgaatgaatgggtgagttgtagggtttatttgtaaagggattaggagtgataaggaaataataatttatttaggtagttgtttttgatttttaatttttaaatttgtttgttgtatgaggggaagttattttttatgggagcgaagttaatggggtgggaggttatatttttattattgagtttttttaggagttttaaggtataaggtttttggttttttatttttaattattttttatattttttatatttttattttttgtgtttttttttgtgtttttttttttttttttttttttttgttgttttgttgttttttgatgtgtgttttgtttttttgtttgtattatttttagagtttgagttgttagagttagatgattttttatttttatgttttttttttttttttttttgaaaagaaaattttaaaaattaatattgtatgtgtatatttgtttttaataattatagtatataattggttaggtgtagtggtttatatttgtaattttagtattttgggaagtcgaggtgggaggaatgtttgaggttaggagtttaagattaatttggttaatatagtaagattttatttttaaaaagagaaaaaaagaaaaattatagtatataattaataggggattatttaatttttttttagatagtttcgttttgttgtttaggttagagtgtagtgtagtggtacgattatagtttattgtaattttaattttttgggtttaagtaatttttttattttagttttttaagtagttgggattataggta

SEQ ID NO: 238 - DNA, 2501 bp, Artificial Sequence
  chemically treated genomic DNA (Homo sapiens)
tagaaaaagtattttaagataaaatttttataatttagtaagttttgggaaaaaggttaaagttttttagtttttatttgaaaatatttattgtatagaaaatttaggagaaaaaatttaatttaggtagttaagtttgaggtattgttattttatttaaatttgaatagggtattttaaaatgatatattggtttttataagaggaatagaaagaggtttgtagttatgtttataggtttatgtttttaggtaaattaaattagtttgatttttaaaaaacgagagagagatggtgaatagtggaaaaggtttaaaataaaatatgaaagatagtttttgttatagtatttgttatatttttttaggtaattgagtgtagagttgataaatttatgatatgggagaatgaaataagttttttagaatgtaaggatttgagtataatattatatttgaataataatagggggtaaggtagtttgggtttttaattatttagaatattttaaaaagagggttggggagagaaaggttaagtgtatatatatttaaagttatttagtaaagatttatttatattttaaggtgaaattagaatataatgaatgtgttttttagttaaaaattatgattattaagtggttgatataattttttttaattaattgttaatagtatttatttattaattttgttttttatttgtgtttgatttatttttgtaatttataatatgaatatatttatttataggttagatgaagaattgtttaattttaatttggaattatttaattttaaaaataaaaaagaaattatttataggagaggatttgtaattggggtttatgggagtttattaataggtttgttagaaaaaaatataagatattagttaaatttgaattttagataaataagtaatttttttagtttagatatatgttagtattgtatggtaattttatatttataaataaattttagagagatagatatattttttttttttttttttttgtttttttgaaattgagttttgttttgttatttaggttggaatgtagtggtatgattttagtttattgtaatttttgttttttaggtttaagtagtttttttgttttagttttttaagtagttgggattataggtatgagttattgtatttggttttttttaatattttttgtttataggttaaatattatttttagttattttagtagtttattatgtgaattgagattaggagggataatatagattgttagatagatttaggtatgagttcgttagatattgtataaaaatttggagtagaagtattttgataaggaaattggttatagttatttttttattagagttttaaatttatgattttttaatagttagttattattaagataaagattaattttattaagttttgatttttttttgtggtttgagttttttaggagtcgaatataaagggaaatatgaagggtaatttattaaatagtaattgaagagaagagtttatttagtgaaagtagaggagtttgttcgggggcgtgttagggaggtagagaaagttggtttatagggttttgtagatagatttgagtttaagggttatgttatatttttaagttaagttggggttgattttttaaataagaagttgtgtatgatagaaggtttgttttgtgaatattggattttggaggagtattatcgtaggaaagattggagaaaggtggtggtgggttgggggtattggtttggaagaagagagtgaagaggtaggagagttggaagagattgggaggttgggaatatagtatttaagggttagggtttttttttttttagttttttgttttttgtagttattatttaaggatgttggtgaaggtgtttttgtgtatttttattttgagagtgtagttttttttttgaggtttacgggagggtttgggtaatgacgaaatgtagtttttatttgtgttattgaaagtagattcgtagagttgcggtttttgttgttatttttttttttgatttttaagaggtaggaaagttttttttgttatgtttttggagttttggagaaaaaaaaaggaagaggtttttttatgggtttttgggatttttttgaataaatttcggggggttgggggagattgaataaaatttgtaaattagaggttagtaggtgtattttttaattgttttagttgttataatttgtaaataggttttatataagaatttatatttaaaataattagattatttgttattttgtaattatttattgaggttgaggggggtgatgatatgatataggtttgtgtttttgtttatattttatgttaaattagaatttttagtgttagaggtggggtttggtggtaagtgattggattattaaggtagaattttttattggtgttgtttttatgatagtgagttattgggggattttattgtttaaaagtgtgtagtatt

SEQ ID NO: 239 - DNA, 2501 bp, Artificial Sequence
  chemically treated genomic DNA (Homo sapiens)
ggtgttatatatttttaaataataaggttttttaataatttattattatgagaatagtattaatggggaattttgttttgatggtttagttatttgttattaggttttatttttgatattggggattttaatttgatatgagatatgggtaaggatatagatttatattatattattattttttttagttttagtagatgattataagatggtaaatgatttgattattttaaatgtggatttttgtataaagtttatttgtaagttgtagtaattgaaataattaaaagatatatttattggtttttaatttgtaaattttgtttagttttttttagtttttcgaaatttgtttaaggagattttaagggtttatgaaagagtttttttttttttttttttttaaagttttagaaatatgataaggaggatttttttgttttttggagattagaggaggaaatggtagtagaagtcgtagttttgcgggtttatttttagtgatataggtaaagattgtatttcgttattatttagattttttcgtgggttttaggaaagaggttgtatttttagaatggggatgtataaaaatatttttattagtatttttgggtggtggttgtaaaggataaagagttggaggggagaaaattttggtttttgagtattgtatttttagttttttagttttttttaatttttttgtttttttattttttttttttaagttagtgtttttagtttattattatttttttttagttttttttgcggtggtgtttttttagaatttaatgtttataaagtagattttttgttatgtataattttttgtttaaaaggttaattttaatttaatttaaaggtgtgatatggtttttaggtttaagtttgtttgtaaagttttgtaaattagttttttttgtttttttaatacgttttcgggtaaatttttttgtttttattgagtggatttttttttttagttgttatttggtaaattgttttttatgtttttttttatgttcggtttttaggaagtttaggttatagggaaaagttaaggtttgatagaattaatttttgttttaatgatgattaattgttgagagattataggtttaagattttggtagaaagatagttatagttaatttttttgttaaaatgtttttattttaaatttttatgtagtgtttaacgagtttatgtttagatttatttggtaatttatattattttttttagttttagtttatatagtagattgttggaatgattgagggtgatgtttggtttgtaaataaaaagtgttaaagaaggttaggtatagtggtttatgtttataattttaattatttgggaagttgaggtaggagaattgtttgaatttgggaggtagaggttgtagtgagttgagattatgttattgtattttagtttgggtgatagagtaagatttagttttaaaaaaataggagagagagagagagaaatgtatttatttttttgaaatttgtttataaatatagggttattatgtaatattggtatatatttagattaaaaaaattatttgtttatttgaaatttaaatttaattggtattttgtatttttttttggtaaatttgttaataaatttttatggattttagttatagatttttttttataaatagttttttttttgtttttagaattagataattttaaattaaaattaggtaattttttatttgatttgtgaataaatatgtttatgttataagttgtagaagtagattagatataaataaaaaataaaattagtgaataaatgttgttagtaattgattggaaaaaattgtattaattatttagtgattatgatttttagttagaaaatatatttattgtattttgattttattttgaaatgtaagtaagtttttattggatagttttaaatatatgtgtatttggtttttttttttttagttttttttttagagtattttaaatagttaaagatttagattattttgttttttattgttgtttaaatatggtgttgtatttagatttttgtattttagaaagtttattttatttttttatgttataagtttgttagttttgtatttagttgtttggggggatatggtaagtgttataatagaggttgttttttatattttattttgaattttttttattgtttattatttttttttcgttttttaaggattaagttagtttagtttatttaagaatataggtttatgggtatgattataaatttttttttgttttttttatgaaggttagtatgttattttagagtgttttgtttaaatttaaatggggtgataatattttagatttgattgtttaggttgaatttttttttttgggttttttatgtagtgggtatttttaggtagaggttagaaagttttagttttttttttaaggtttgttgaattgtaggagttttgttttagaatgtttttttta

SEQ ID NO: 240 - DNA, 2501 bp, Artificial Sequence
  chemically treated genomic DNA (Homo sapiens)
aaagatgattaaaagtttaattgtttatttgaagagttgatttttttatttttgtaataaagggtatttttagtagtttttgtttattttgtttatttggttttttttgtggttgtgtaaggttataatttttgtgttttagtaaatttgtgtatgtttatttttttttttgttattatttttttttttattttgttttattattttgatgtaaaattatttgttaattttatttgaaatgagaaattttaaggtttatattatttaaattttgttagatttttatttttgttatatggtttataatgtgttgggtatttttagatttgtttattaaaaagatgtaaaataaaataatgattatttttgtggattttttttttatttttgagatgttttttttggttgtattatttttttattttttgtttattgattagaggaggggttttaattatgggtgaattttatattttattgaagaggttatgttatatgtatatttttataatataatttatatttatatagtatttttatttttagtatatttttttttattaattttaataatattattgtaagttatgttgaagtagattgtaagtgtttatttataaattgtgaaatgaattaaaatgaaagggtaaagattaaattatgattaggtttgaaattaatatataagatttaattttttttaattaaagatttttgtaggtgatttttgtttgtaggatttttttttttttttagatgttattggattgtattaggtttattgtagattttagttgttgtagaattaattagatttaagatgagttttttgattttttttggtagagttttttaattgttgaattttaatattgttgtgattagttagtgttataatttgtttgttttattttgtgtaatggattttatattatagaggtatttttttaatgttaagatgtttaagtattgtttaagtgtaaattatttaatattttttagttattaagtaattaagataggtaggattttatttgttttaaaatgatttgatttaaattaaaaagagaatgtggattttttgaattttatttggttaattttaatataatttttagtattttataattttttttaaagtttttttatttggttattttttgtattttttttgttttttttttttttttttagttataataattgttagattttgttttatttttttttgatagtttttatttttaaggttatttattttttttaggtattttttggttttagtttgagtatagtagattttaagattatatatgttatagtataggttattatagttaattttttgaataaatgtgattgaattttatgttagtaatttttatttattatttttttattaaaaaggtttaaagtttttatttaatgtttttttttatgtttattttgttaaatgattgttttttaatgatattttagaattttagaattattttattatggaggatgtgtaagattagttttttattaaataaaaagtgtgaaatggaatatgtaattttattaatttattttggttttaaaattttgtgattattagataaaatttagaaataaaatagtattattaatataaataaatttttattataattatattttttaagttttgtttgtaagaatgggtaaaatatttttaaaattttgaagaaattattatttgatagaaagtttaatttatttgtgagaaggtaaatgtatttagatataattaaagtttttttttttattttaattttatttattttgaattaagattttattgttttatttttttagatgttgttatttgaataatattgttttgagattaaaaattagtatattaatataattttttttaaatgttttaagagttttgttttttttatttttttttttaaaaataagtagttattaaattttttagtagtgaattttaaaattttttttaattttataggtttaagggtagttaaggatggttgtagttttatatgattagttgttaaagtaagttgaggtattgaagatggagaatttaaatttttgataagagttagaagataattttaattattttataaaattggaaattgaggtatttaatatgaaggtattaagattgtgatttttaattgtagtttatttatttttatttagtatttttttttgtaaatttgaggtaagatattttatttaaaagtgtattttaaattaagtaataatatgtaaatttttttttgtaaaagttagtatttatatttttaaataagatatattgaatttatttagtgaattatataaagaaaataagtgtaaaattttaatggttagttagtttttagttttttttaagattaaagagaagagattaaatatagtattattgtattgaggtaaggttttttgtgtagtttatagaaattagttttatgattttagaatatgttttgaatatt

SEQ ID NO: 241 - DNA, 2501 bp, Artificial Sequence
  chemically treated genomic DNA (Homo sapiens)
aatatttaaggtatattttaaaattatgaggttagtttttatgaattatatagaaaattttgttttagtatagtgatgttatatttggttttttttttttaattttaaaaagaattaagaattaattagttattggagttttatatttattttttttatatgatttattgaatgaatttaatatattttatttaaaaatataaatgttaatttttgtaagaaagagtttatatattattgtttaatttaaaatatatttttaagtaaagtgttttattttaagtttataagagggaatattgaataaaaatggataaattataattaaaagttatagttttgatatttttatattagatgttttagtttttagttttgtaagatgattggaattattttttagtttttgttgaagatttgagttttttatttttagtgttttaatttgttttaataattgattatatgaagttgtagttatttttggttatttttggatttataaggttaaaaaggattttgaaatttattattaaaaaatttagtggttgtttgtttttaaagaaaggggtaaaggaaataaaatttttaagatgtttaagaagaattgtgttaatatgttagtttttggttttaaaataatattgtttaagtagtagtatttaagaggatgaaatagtggagttttagtttaagataaatgaaattaaaatagaagagagaattttagttgtgtttgaatatatttgtttttttatagatggattaaattttttattaagtaataatttttttaaggttttaaagatattttatttatttttataggtaaaatttaggaaatataattatgataaaaatttatttatattagtaatattattttatttttgaattttatttgatagttatagaattttagagttagaatggattaatgagattatatattttattttatattttttatttgataaaaggttaattttatatattttttatggtgaaatagttttgaagttttaagatgttattaaaaggtaattatttaataaaatggatatgaaggagagtattaaatgaagattttaagtttttttgataggaagatggtaaataagaattattaatataaagtttaattatatttatttaaaaggttgattataatagtttatgttatggtatatgtggttttgggatttgttgtgtttaaattgaggttaaaagatatttaaagagaatggatgattttaggagtagagattgttaaagagaaatgaagtagagtttggtagttattatgattgggaaagaagaggagagataaagaagatataaaagatagttaggtaagaggattttaggaagaattatagaatgttaggagttatattaagattaattaagtaagatttaggagatttatattttttttttagtttaggttaaattattttggaataaataaaattttgtttattttaattatttaatagttaaaaagtattaagtagtttgtatttaagtaatatttaaatattttgatattaaaaaaatgtttttgtaatatgaaatttattatataaaataaggtagataggttgtaatattggttagttatgataatattggagtttagtaattggaagattttattaaaggaaattaggggatttattttagatttagttagttttataatggttagaatttatagtaaatttggtataatttaatgatatttgaggaggaaggggagttttgtaggtagggattatttataaaagtttttggttgaaaaaaattgagttttgtgtgttaattttaggtttggttatgatttaatttttgtttttttattttaatttattttataatttgtaaatgaatatttataatttgttttaatataatttatagtgatattattaggattaataaaaaaaggtatgttaaaaataaaagtattatgtaaatgtaagttatattatgaaaatatatatgtaatataatttttttagtaagatatagggtttatttatagttaagattttttttttgattaatgggtaaggggtgaagaagtaatgtagttaaaggagatattttaaaaataaaggaaaaatttataggagtgattattattttgttttatatttttttaataagtaggtttgaaaatatttagtatattataaattatatgatagaggtagggatttgatagaatttgaataatgtgaattttaaaattttttattttaaataaaattaataggtaattttatattaaaataataaaataaaataagagaaaaggtagtaatagagaaaaaaatgggtatgtataagtttattgagatatagaagttataattttatataattataaaaagagttggatgggtaagatgagtagagattgttaaaagtattttttattataggaataaaaaaattaattttttagatgaataattaaatttttaattattttt

SEQ ID NO: 242 - DNA, 6277 bp, Artificial Sequence
  chemically treated genomic DNA (Homo sapiens)
gtgtgttaagattatgttattgtatttttgtttgggtgatagagtgagattttgttttaaaaataaaataaaaaattggtttggtgtggtggtttatgtttgtaattttagtaatttgggaggttgaggtggaaggattgtgaatttaggagttgaagattagtttgggtaataaagttggattttgtttttttaaaaaaattaagtttaattaaatatttttaaaaataataaattagttattagaattataaatttgtattgtttttgataatgtaatgtattgttttgtaaaatattataattaagattgttattttaaggattttgaagtttgtgaagattaggtatttttttgaaattttaagataattattttttagttttttttattttttgtttttatttagaattaagtttattattaaaatgtagttttgttgatgttaagtatttatttatatgatatgtaattattggggttgttaaaatttgggtagaatttttgttaatttattaggattttaggtaaaaaattaggaaaatgaagtgattgatttagtttgttaaaagtggatattttgaaatattattttttaattttaagaaatattttttgttaggtgtggtggtttatgtttataattttagtattttgggaggttgaggaaggtagattatgaggttaggagattgaggttattttggttaatgtggtgaaatttttatttttattaaaaatataaaaaattagttgggtgtgatggtgggtgtttgtagttttagttatttgggaggttgaggtaagagaatggtgtgaatttgggagatagagtttgtagtgtattagttgtgattgtgttattgtattttaggttgggtgatagagtgagatttagttttaaaaaaaaaagaaaaaaaagaaatatatttttttatttgttagggaaattaatttttgttttttttttttaaattatataattggaaattaatttagatattttggagtttttttagttggtgggttaattaagagaaaataggaagtgggagattttagtttagttggattatatttaggtttttataaggaattttttttggttggtatgtaaaaaaatttttttagtaagagtattaattttgaatgtgtgtaaatatgaaagttatggttaattttatttgttttttaggtttatagttagtagagttagatagttgggttttaggtttttagtttttataattgatattattgttaagtttatgtgattgatttattttgttttggtataagttagttttttttttatattgattttttttttttttagttttaataaaatttttttaatgaaataaatttggtaatttgaattttggttattgtttttattagaggtttgtataagttaagttatttaagttgaggttgggagtggtggtttatgtttgtaattttagtattttgggaggttaaggtaggaggattgtttgagtttaggagtttaagattagtttgggttggtttttgagaaagtgagattttgttttgaaaaaaaaaaaaaaaagtgtggtttgaaagttgagtgtttgataaaaaggagaaatagtgtttttttaaaattaaaggtttttaattaagatttttttaatggggttttgaaaaaaggagaatgggatgagaaggatatatgggtagtgttattttttaatttgtagattttattttagttttttagttattgttttttagtattttatgtttttaagatagtgttattattttaaggatttttttttattttttttgtttgggttttttttttattgaggagttgtggttttttattagtagaagttggatgtttttgtgtttgaaattggtgggtttttggttttattgattttaagaatgaagttgtggatttttatggtgagtggtatagtttttaaagatgatgtgtttagagtttgttttttttgatgtttggatgtgtttagagttatttttttttggtggatttgtggttttgttggttttaggagtgaagttgtagatttttgtggtgagtgttatagtttttaaggtggtatgtttggagtttgtttgttttttttgtttggagttgtttattttttttggtgggtttgtggttttgttggttttaggagtgaagttgtagatttttgtggttggtgttattagtagataaatgttatgtggatttaaagagtgagtagtagtaagatttattgtaaagagtataagaataaagtttttatagtgtggaaggagattagagtgggttgttgttgttggtttaggtagtttgtatttttttttttttttttttttttttttgagatggagtttttttttgttatttaggttggaatgtagtggtgtaatttgggtttattgtaagttttgttttttgggtttatgttatttttttgttttaatttttttagtagaggggattataggtatttattattgtatttagttaatattttgtttttttagtagagttggggttttattgtgttagttaggatggttttgattttttgattttgtgatttatttttttaggttttttaaattgttgggattataggtgtgagttattggtatttagtggggtagtttgtttttatttttttatttgattttatttatattttgttgattggtttattttatagagagttaattggtttgttttgatagggtgttgattggtgtatttataatttttgagttagatatatatagagtgttgattggtgtatttataattttttagttagatataaaaattttttaagtttttattatatttgttagatatagagtattgattggtgtgtttataaatttttagttagatatagagtgttgattggtgtatttgtaaattttgagttagatatagagtattgattggtgtatttataattttttagttagatatagaagttttttaagtgtttattagattagttagatatagagtgttgattggtgtatttttaaattttaagttagatatagagtgttgattggtgtatataaaatttttaggttagatataaaagttttttaagtttttatttgatttaggagtttagttggttttatttagtggattttgtgtagggttgtgttgggtgtttgtattttttttagtttttgggtagttgatgggattgggtgttgaggagtagggggtggtgtttgttggggaggtttaggttatgttggagtttataggggttgggagggggtttgggtatggtgggttgtaggttttgagttttgttttgtgtagggtggttggggtttggtgagaatttaagtggggtgtaggtgggttggtagtgttgggggatttggtgtattttttgtagttgttggtttgggtgttaggtttttgattgtttggggttgggggtgtggggtttgttgagtttgtgtttatttggaatttgtgttggttggtgagtgttgtgtgtagttttagtttttatatttgtttttttttttatatttttttgtaagtagagggagttggttttggttttggttagtttagagaggggtttttatagtgtagtggtgggttgaagggtttttttagtatggttagaatggatgttaaggttgaggaggtgttgagagtgagtgagggttgttagtatgttgttattttgtattttgaattatagattttttaattttttggtgttttttgtttatttggttttttagaatatgaagggtttttttattttgttattaaaatgattagttgtttggagatatggaaaaagttgttttttttttttgtaggattttttttttgaatttttttaaatttttttagtgtgatgtgattttatttttagttaatttaggttgtttttttattagttttttgttttttggggaggtggtaatgtaaagattgtttgttgttagttttgttgttatttttgtggggtgaatttaatatggtggataaagatagtaattagttttgtttttttgtgtttttgttaagaagattggtttttattatttgttttttaaaatgattattttattgattggtggtgattgtgttgatggagatggggtaaaagtaagttgaatttgaaaaataataaatattggggttgaggggtggaattatgagtgtgtagatatgggttagagtgtattttttttgttttaggtaaatttggtgtttattgtgtttttgtaggttattgattttataagattatttgttttagatttttggggttggatgggaattgtagtttttttaaagagttgtatgtatttttttaaggtttagtttttgtttttaaaatatgaaaatataatattttagtttataattgttgataagtataagtgtgtataggtttttaatttatttattggatttttgtgagaattgtgtttgttttggtattggatgtttttttttataagattatagtttttaaggaatattgtggtgaagattttttattttgtaatgtatgttggaaataattatttttttttatttttttaataatttttattatttatatttattgaaattggagatttttattagggtggaaagagtgggggattgggatttttttttatgattgttttggataataggtagtgattttgatttttgtatagtaattattgtgatgtaataagttgtaattggaagagtagaggttagagggtaggtattttatggtaaatttaggtagaatttttttttttttgtttttttttttttatgttatttgggggtagattgggtggttaatttagagttttgagagatgtttggttttttttgttttttttattttttgattgtattttgattttgtattttgagaggttgttgtttagtggtagttttttggtttttgtggtaatggaaaagtgtgggaattatagataaattaaaattgtgattgtgtggtgtgagtttgttgagattttttggatgggggataggttgtggggttttttagataattgggtttttgtgtttaggaggtttttattttttgttttgggtaaaggtagtagagttttgggaaagggatagggggtttaagtgatgttttggggtattggtgtgggagagtggatttttgaagttgatagatgggtattttttgatggggggtaggggtggaatttgagaggtgtaaggtgttgtgaattttggggaggggggtagtttgtaggttgtgagggaagtgttgaggattaggaagggggtattgagtgtttgtgggggaatttttgtgataggaattggaatatgttttgagggggatattatgtttttaaaaatgttggttggttatgaggttaggagttttagattagtttgattaatgtggtgaaattttgtttttattaaaaatataaaaattagttgggtgtggtgttgttttagttatttaggaggttgaggtaggagaattgttagaatttgggaggtggaggttgtagtgagttgagattgtgttattgtattttagtttgggtgatagagtgagattgttttaaaataaaataaaataaaataaaataaaaaatattggttggtatgtatgagaggatgggattttgtggaagaagaggtgttaggaatatgtttgggaaggggaggagataggattttgtgggagggagaatttaagaattggatttatttgtgttattgagaaagtgtaagagggaagtagaggagtgttagtagtaatagatgttgttggtagggatgtgtttgaggaggatttagagatgagagtaggttattgggaaaggttaggggtggggaggttttgattggtgttggtttggttgttgttgattttggttttatgtaagaaaaagaaaataattagaaatattggagaaagttaaggttattattatttatttggttagttatttttttgtagtttttttttttttggagaaaggaaaagatttaaggggttggtagtaatatgtgaaaaaatttagaatttatgttgtttaattataaaaagtaatttttagaatttttaaaaataaaggatgttgttattagttttttggtttgtattattttaaaattttttaaattttaaatttattttattttaaaatgataaaatgaagttgttattttataaattttttaaaaagatatatatatatgtttttttaatgtgttaaagt

SEQ ID NO: 243 - DNA, 6277 bp, Artificial Sequence
  chemically treated genomic DNA (Homo sapiens)
attttaatatattagaaaaatatatatatatatttttttaaaaggtttataaaatgataattttattttattattttaaaataaagtaaatttaagatttggaaggttttagaataatataaattaaagaattaatgataatgttttttatttttaaagattttagaagttgttttttgtaattagataatataaattttgaatttttttatatattgttgttaattttttgggtttttttttttttttaagaaagagaaagttatagaggagtgattgattgggtaggtggtggtagttttagttttttttaatgtttttggttgtttttttttttttgtataaaattaaaattaataatgattaaattaatattaattaaggtttttttgtttttaattttttttagtgatttgtttttatttttggattttttttaagtatatttttgttggtagtatttgttattattgatgtttttttattttttttttgtgtttttttaatggtgtaaatggatttagtttttaagtttttttttttataaaattttgtttttttttttttttagatatatttttggtatttttttttttataaggttttatttttttatatatattagttggtgttttttgttttgttttgttttgttttgttttgagatagttttgttttgttgtttaggttggagtgtaatggtgtgattttggtttattgtaatttttgttttttgggttttagtgatttttttgttttagttttttgagtagttggagtggtattatgtttggttaatttttgtatttttagtagagatggagttttattatgttggttaggttggtttggaatttttgattttatgattagttgatgtttttaaagatatagtgttttttttaaggtatattttagtttttattatgaggatttttttatggatatttagtgttttttttttgatttttagtgttttttttgtgatttataaattgtttttttttttagggtttataatgttttatgttttttaggttttgtttttattttttgttaaagaatatttatttgttagttttggaaatttatttttttatgttagtattttagagtattatttgggttttttgttttttttttgggattttattatttttatttagagtagagggtgaaggttttttgagtgtaggggtttagttatttgagaaattttatagtttgttttttgtttaggaagttttagtgagtttatgttgtgtagttgtagttttaatttatttgtaatttttgtgtttttttgttgttatggaaattaaggggttattgttaagtagtagttttttagaatatgaaattaaggtataattagaggatgggagggatagaaagagttaagtgttttttggggttttggattggttatttagtttgtttttggatgatgtaaaaggaaagagatggaagaggaagaattttatttgagtttgttataaagtgtttgttttttagtttttatttttttagttgtggtttattgtattatagtaattgttgtatgaaggttagaattgttatttattgtttaaagtagttgtaagaagaggttttaattttttattttttttgttttaatggaggtttttagttttggtaaatataagtaataaggattgttgggggggtggagggaaataattatttttagtatgtgttgtggaatgaaaggtttttgttatagtgttttttagaaattgtagttttatggagaggaatatttaatattagagtgggtataatttttatggaaatttagtggatagattggagatttgtgtgtgtttgtatttgttaatagttatggattggagtgttatgtttttgtattttgaaagtagaaattaggttttaaaaagatatgtataattttttagggagattataatttttatttagttttaggagtttggggtaagtagttttgtaaggttagtggtttgtggggatgtagtgagtgttgaatttgtttggggtaggggaaatgtgttttggtttatgtttgtgtatttgtagttttattttttagttttagtgtttgttattttttgggtttagtttgtttttgttttgtttttgttgatgtaattgttattagttaatggggtggttgttttgagggataagtggtaagagttaatttttttggtgaaaatgtggagaaatgggattagttattgtttttgtttgttatgttagatttattttatagagatagtggtagagttggtagtggatggtttttgtattgttgtttttttagggggtgggaagttggtaaggaagtagtttgggttagttaggggtggggttatgttatattaagagggtttggagaagtttaagggaggaattttgtaaagaagaggggtgattttttttgtgtttttggatagttaattgttttagtgataggatgagagagttttttgtgttttgagggattgagtgggtgaaaagtgttggagagttggagagtttgtggtttagaatgtgaggtgataatgtgttagtagtttttgtttgtttttggtgtttttttggttttggtgtttattttggttgtgttggaggagttttttagtttgttattgtgttgtgggggtttttttttgggttggttgaagttagagttggttttttttgtttgtggggaagtgtggagggagaggtgggtgtgggaattggggttgtgtgtagtgtttgttagttagtgtgagttttaggtgggtgtgggtttagtgggttttgtatttttggttttgggtagttaggggtttagtatttgggttagtagttgtagagggtgtgttgggttttttagtattgttggtttgtttgtattttgtttgaatttttattgggttttagttgttttgtatagggtaaggtttaggatttgtagtttgttatgtttgagtttttttttaatttttgtgagttttagtgtggtttgagtttttttgatgggtattgttttttgttttttagtgtttggttttattgattgtttaagggttgagaggagtgtaggtgtttggtatagttttgtgtaggatttattaggtgaagttagttgggtttttgagttagatggggatttggaaaatttttatgtttagtttgaggattttatatgtattagttagtattttgtgtttagtttggggtttggggatgtattaattagtattttgtatttagttaatttggtgggtatttggagaatttttgtgtttagttaaaggattgtaaatgtattaattagtgttttgtgtttagtttaaggtttgtaaatgtattaattagtattttgtgtttagttaaaggtttgtaaatgtattaattagtgttttgtgtttagtaaatgtagtggggatttggagaatttttatgtttagttagaggattgtaaatgtattaattagtattttgtgtatatttagtttagggattgtaaatgtattaattagtattttgttaaaatggattaattagttttttgtaaaatggattaattaataggatgtgggtggggttagataagggaataaaagtaggttgttttgttgggtgttagtggtttatatttgtaattttagtaatttgggaggtttagaggggtggattatgaggttaagagattgagattattttggttaatatagtgaaattttgattttattaaaaagataaaatattagttgggtgtggtggtgggtgtttgtaattttttttattggggaggttgaggtaggagaatggtgtgaatttgggaggtggagtttgtagtgagtttagattgtattattgtattttagtttgggtgatagagggagattttattttaaaaaaaaaaaaaaaaaaaaaaaaaaatgtaggttgtttgagttagtagtagtaatttgttttggtttttttttatgttgtggaagttttgtttttgtgttttttgtaataaattttgttgttgtttattttttgggtttgtatagtatttatttgttggtaatattgattgtagaggtttgtagttttatttttgaagttagtgagattatgaatttattaggaggaatgaataattttagatgggaggaatgaataaattttagatatgttgttttaagagttgtaatatttattgtaaaggtttgtagttttatttttgaagttagtgagattatgaatttattagaaggaggtaattttgaatatgtttgaatattagaaggaataaattttggatatattatttttaagaattgtattatttattgtgagggtttgtaattttatttttgaagttagtgagattaagaatttattaattttggatataagaatatttggtttttattgatggaaggttatgattttttagtagaaagagggtttaggtaaagaaaatgagagagagtttttggggtggtgatattattttgggaatatggagtgttaggaaatgataattggaagattaggatgaaatttgtaagttaaaaaatgatattatttatatattttttttattttatttttttttttttgagattttgttaaagagattttggttagggatttttggttttggaaaggtattgttttttttttttgttaaatatttaatttttaggttatattttttttttttttttttgagataaagttttgtttttttaaagattagtttaggttggttttgaatttttgagtttaagtgatttttttgttttggttttttaaagtgttgggattataggtatgagttattatttttggttttagtttggataatttggtttgtataggtttttggtggagatagtaattaaagtttgggttgttaggtttgttttattaaagggattttgttgaggttgaaagaaaaaaaaattgatgtggaggaaaagttaatttgtgttaagataaggtgagttagttatatggatttaataataatgttaattatgaaagttgaaggtttaggatttagttatttgattttattggttgtagatttaaggagtaggtagggttaattatagtttttgtgtttatatatgtttaagattaatgtttttgttgaaagaatttttttatatgttagttaaagagagttttttatggagatttggatatggtttagttaagttagaattttttattttttgtttttttttagttggtttattagttggaggagttttagaatatttaaattaatttttaattgtgtaatttgagaaaaagagatgaagattaatttttttaatgagtagggaagtgtgtttttttttttttttttttttttgagattgagttttgttttgttgtttagtttgaagtgtagtggtatgattgtggttagtgtattgtgaattttgttttttgggtttatgttatttttttgttttagttttttgagtagttgggattataggtatttgttattatgtttagttaattttttgtgtttttagtagagatgggggttttattgtgttagttaggatgattttgattttttgattttgtgatttgttttttttggttttttaaagtgttgggattataggtgtgagttattgtatttggtaggaagtgttttttaaagttggaaagtggtattttagaatatttgtttttggtagattgagttagttattttatttttttgattttttgtttaaggttttggtgaattgataaagattttgtttaaattttaatgattttagtaattatatgttatatgaatgaatatttgatgttagtaggattgtgttttggtggtgaatttggttttaggtagaaataaagaatggagaaaattgggggataattattttagggttttaaaaaagtgtttgatttttatagattttagggtttttaaaataatagttttaattgtagtgttttatagggtagtgtattatattgttaaaaatagtataggtttatggttttaatgattggtttattatttttaaaaatgtttaattgaatttaatttttttaaggagatagggtttggttttgttgtttaggttggtttttaatttttaggtttatgatttttttattttagttttttagattgttaggattataggtatgagttattatattgggttaattttttattttatttttgagatagagttttgttttattatttaggtgggagtgtagtggtatgattttggtgtat

SEQ ID NO: 244 - DNA, 1630 bp, Artificial Sequence
  chemically treated genomic DNA (Homo sapiens)
gagtttgagttatgttatgtttgttgtatgtgttagtttgtgtagtatattagggtgttggtttttttttttttttttggagtgaaatatattaaagggtgtggtgggggtggggggtgatgggaggaaggaggtgaagaaatgttattagattgtattttttgtaaagatagttttgatttaaggatgtgttagagtatgtgttagggttgattgtgttggtggattttattgtagttggtttttagggagaaagtttggtagagtgaggtgtgaaattggagggttggtgaggatgtgggtgaaggattgagtgtggaggttttatgtttttggggaaaggaaggggtggtggtgtttgtgtagggggagtgagggggagttggatttaattttttatttgtttttttttttttttgggttattttttagaaagttgtattggtgtggttatgtttagtgtagatattttgggtggtttgttagtagatgtaggggtgaggaagtgggttttttttgtgtggttgttgggtgggggaattgttgggagttttgtttttggtttgtggtggttttagatgttgtattgtgttgttttatgggttttgaagagtttttagaaatatgatggtttttgtttgaggattatattttatttttttagagaagtatttttttttttttttaatatttattttttttttttttttttttttttgtatatattttgtaggggggggtagaagggatgttgttttggtttttttaattggggtttttgaaatagttttgaagttattaggaatatagattttagggatatgatttttatttttgggtatgtgaggttgttattttttaaaattatttttttttttattttttatttaagggatttatttttaaattgtttgaggttattttatttttagataatttattttatatttttggattttaaatataagggtaggaggattaggatttgttttgaagaagttaaagttggagggttgtattttggtgtgttatatttatagaatgagtgaaattagagggtagaaataggagttggtagttttttgtgggttgtttgtttggggtttttggtatgtaggttggatggagggagaggggtggggggtggtgggggattgtgtttgaagttgggttgggttagttgttgttttttttaataatgagaggggaaaaggagggagggagggagagattgaaaggaggaggggaggattgggaggggaggaaaggggaggaggaattagagtggggaggtgtggggagagggaggagagttaattgtttagttagtttgtgttattgttttagagtggagaagagtgagtaggggagagtgagattagttttaaggggaggattggtgtgagtgaggtagttttgaggttttgtttgtttattatttaatttttgttttttttttgttttattttttttttttgtttttattttttttttgaaaattttttatttagttaaaggaaggaggttaggggaatgtttttttttttttttttaaaaaataaaaatagaaaaatttttttttaggttggggaaagtaggagggagaggggttgttgggttggttatggag

SEQ ID NO: 245 - DNA, 1630 bp, Artificial Sequence
  chemically treated genomic DNA (Homo sapiens)
ttttatggttagtttggtggttttttttttttttgttttttttggtttggaaaagggtttttttgtttttgttttttggaaggggaggggagagtgtttttttgattttttttttttggttaaatagggggtttttgggggagaggtgagggtagagagagaaggtggagtagaagggaggtgaggattgggtggtgggtgagtagagttttggggttgttttatttgtattggttttttttttaaaattggttttgtttttttttgtttgtttttttttgttttgaagtggtgatgtaagttggttgggtagttagtttttttttttttttttgtgtttttttgttttggttttttttttttttttttttttttttggttttttttttttttttttaatttttttttttttttttttttttttttttttgttattaaggagaatagtagttggtttgatttaattttaaatgtggttttttgttattttttatttttttttttttatttagtttgtatgttaggggttttggataggtaatttataaaaaattattgatttttatttttgttttttaattttatttattttgtaggtgtagtatgttaaaatatgattttttaattttggtttttttaaaatggattttaatttttttgtttttgtatttaagatttaggaatgtagggtagattatttgaagatggggtgattttagataatttagaaataggttttttaagtgaaaaataagggagggggtgattttagaaaatagtaattttgtatatttagagataaaggttatgtttttgaagtttgtgtttttgataattttgaagttgttttgaaagttttgattaaagggattagaataatgttttttttgtttttttttgtagagtgtgtgtagaggaagaagagggagggagaggtgggtattaggaaggaaggggggtgtttttttggagggatagaatgtgatttttgagtagaaattattgtgtttttgggggttttttggggtttgtggggtgatgtggtgtagtgtttagggttgttgtaggttgggggtagggtttttagtggtttttttgtttagtggttatgtaggaaaaatttgtttttttgtttttgtatttgttgataagttgtttgaggtgtttgtgttgagtgtggttatattgatgtagttttttaggaaatggtttgggagggggagggggtgagtgagggattaggtttggtttttttttgttttttttgtgtaaatattattatttttttttttttttggaggtatgaggtttttatgtttggttttttgtttgtatttttgttgattttttggttttgtgttttattttgttaggttttttttttgggagttgattgtggtgaagtttgttagtatggttggttttgatatgtgttttaatgtatttttgagttaaggttgtttttataggagatatgatttggtggtgtttttttatttttttttttttgttattttttatttttattgtgttttttggtgtattttattttaggaggaaggggagagattagtgttttgatgtgttgtgtaagttggtatgtgtagtgggtatggtgtggtttgagttt

SEQ ID NO: 246 - DNA, 2501 bp, Artificial Sequence
  chemically treated genomic DNA (Homo sapiens)
ttaataaaattgtttaataaaatttataaaaatgtatttttgagaatattttttttagtttgaattgttttttttttttatttttaaagaaaatatataattattagtatttatatatgtatatatttaaaattatagtgatattttttatatagaattatatttgatatagtttgaattgttgaaaaattaagataattttaaaaagtgattgtagggttgatttttttttttaaaatatttgagaaatagtaaagttattttaataaaagttttttttttgattgttaaaagttgaaatttatatttaaataaaaagagatttaaattaagatttttattattttttattttttaattaattttttttagggttatattttttttttgtttttaagaaaaaaatttggaattttgaatatttttggttttttgtgtatatttggaattgggtaaatgtgtttagtttagttagtattttttgtagatattattaaaagtaggtatttggggattttgggttttgagtataaattatggattttgtgttagaaatatatgttgagatttttttattttttttagaatttttagagatgaggtagatttattttaattatttttagtattagtttgttaaattgttaggtttaatgataagtttttttgttatttttaagtttattttttatagttttgttttgtttttggttgtagtattttaggtattattttaagttttggagtatattatttttgttttagagttaaataaatattaatgaatatatttatttagaataagttattggatagttgtttattgtaagttatatatttaggagatgaaagagggaagttattaaaggtttttagagtagataatatttagttaagatgtggttagataaagatataaattttttattttaaaagagtttaataatttttgtattagagaatttttattttgggtaaagtaattgaatttaggagtgagagttgatattaaaatatggaggttgggtatagtagtttatgtttataattttagtattttggggggttaaggtagaaggattgtttgaggttaggagtttaagattagtttgggtaatatagtaagattttatttgtataaaaaaataaaaaggaggttggtgggagaattgtttgagttttagagtttgaggttatagtgagttatgattatattattgtattttaggtttgggtgatggagtgaaattgttttttaaaaaatggtagggagttggggagttgggtaggtgtagtggtttatgtttgtaattttaatattttgggaggttaagatgggaggattatttgagtttaggagtttgagattagtttgggtaatatagggagattttgttttaaatatttaaaaaattagttatgtgtagtggtgtatgtttgtggttttagttatttgggaggttgaggtgtaaggatagtttgagtttgggaggataaggttgtagtgagttgtgattgtattattgtattttagtttggttgatagaatgagattttgttttaaaaaaaaaaaaaaggtagagggatatattagtgtagtaatgagtagaagtatataaattttttttaaaaaattatatatataaaataatagaattagagtagttgatttttttttttttttttaaaagtgagataaaattttttaagaaaatttgtaaggtgttgggtgaattttttgatgttaaagttgtttttttggaatattaaaatttgggtattttttggatattattattatgtaaagagtgatgggaaaaaaaaaaaagttttaagaaataagttgaaatttttttaatataaatttattagagttataaagtggagagagtataaagttatattaattgtattattaattagttttttttttttttttagaaatttattttaagggaagggagttgaaaaattattagtaatgtgatttttgtattttttagtatatgggtttggggtttgttttttttgagttttttagttgtttttgttgtttttgtatatgttagttagttttttgaagtgattgttttatttgtttaagtagttatagttttggtttttgtttgattttgaggagtttagggagtttagattagtagttttggaattgttttttttatagttaaatatgagtagagaattataaggtggggttgtggggttagtattagttgtttttagattttaaagaagaagggataaaagtattttttagtgaaaggaagggtatatttgttatttggggtaagaagtttagtaatatgtaaggtatgataatgtatttagatttgtggtatattatggagtagtgaatattaataatgtatatttatatatattgttatggaaggatgtagaagtataggatatgttgttgatggaaagagaaagtgaaatggtgagttatatgtaggtaggagagatgtaagtattaatta

SEQ ID NO: 247 - DNA, 2501 bp, Artificial Sequence
  chemically treated genomic DNA (Homo sapiens)
tggttggtgtttgtattttttttgtttatatataatttattattttattttttttttttattaataatatattttgtgtttttgtatttttttatgatagtgtgtataaatgtatgttgttggtgtttattgttttgtggtgtgttataagtttgggtgtattgttgtattttatatattgttagattttttgttttagatgataggtgtgtttttttttttattaaaagatgtttttgtttttttttttttagaatttgaaagtggttgatattgattttatagttttgttttatgattttttgtttgtgtttgattatgaaggaagtggttttgaagttgttagtttgagttttttgaattttttagagttagataaagattaggattatgattatttgaatgaatggggtaattgttttaagaagttggttgatatgtatggaggtggtgaggatgattaggggatttgagagaggtgggttttagatttatgtgttgggaaatgtagaaattatgttgttggtggttttttagttttttttttttgagatgagtttttggggaaaaaaaagagattggttagtgatgtagttagtatagttttatattttttttattttatagttttaataagtttgtgttagaaaagttttgatttattttttaaagttttttttttttttttattattttttatatggtggtgatgtttaaaagatatttaaattttaatattttagaagaataattttagtattagaaggtttatttagtattttgtagatttttttaaggaattttgttttatttttaaaaagaaggggagaagttagttattttagttttgttgttttgtgtatataattttttaaaaaaaatttgtgtgtttttgtttattattatattggtgtgtttttttgttttttttttttttttaagatagggttttattttattggttaggttggagtgtagtggtgtaattatagtttattgtagttttgtttttttaggtttaagttatttttgtattttagttttttaagtagttgggattataggtatgtattattatgtatgattaattttttaaatatttgagatggggtttttttgtgttatttaggttggttttaaatttttgggtttaagtgatttttttattttggttttttagagtattgggattatagatatgagttattgtatttgtttagttttttaattttttgttattttttaagagatagttttgttttattgtttaggtttgggatgtagtgatgtgattatagtttattgtaattttaaattttggggtttaagtagtttttttattagttttttttttatttttttgtatagatggggttttgttatgttgtttaagttggttttaaatttttggttttaagtaatttttttgttttggttttttaaagtgttgggattgtgggtatgagttgttgtgtttagtttttatgttttaatattaatttttatttttgaatttagttgttttgtttaagataggagttttttgatgtagaaattattgggtttttttagggtaagaagtttgtgtttttgtttggttatattttgattaggtattgtttattttgaagatttttaatggttttttttttttattttttgagtatgtaatttgtaatgggtagttatttagtgatttgttttgagtaagtgtgtttattaatgtttatttagttttgaagtaagagtgatatattttaggatttagaatagtgtttaaagtgttgtagttaaagatagagtggaattatgaaaagtgggtttggagatggtaggagagtttgttattgagtttggtaatttagtaaattgatgttgaggatgattgaggtgggtttattttatttttgaaaattttggaaggaatggaggagttttaatatgtgtttttgatataagatttgtggtttgtatttaaagtttagaatttttaagtgtttgtttttgatgatgtttatagaaaatgttggttgagttgaatatatttgtttaattttaggtgtgtatagaaaattgagaatatttaaaattttaaattttttttttaggagtaagaagaaaatgtggttttaaagggggttagttgaggggtagggggtagtgaggattttgatttggatttttttttatttaaatgtgaattttaatttttgataattaaagaaaagatttttgttgaaatagttttattgttttttaagtgttttggagaaaaaaattaattttgtaattattttttggaattgttttgattttttggtagtttaagttatattgaatatagttttgtgtagagaatgttattgtagttttgagtgtatatatgtgtgggtgttgataattgtgtattttttttgggggtggaaaaggaaaataatttaagttgagaaaagtatttttaaagatgtatttttataaattttattaaataattttgttaa

SEQ ID NO: 248 - DNA, 2501 bp, Artificial Sequence
  chemically treated genomic DNA (Homo sapiens)
ggtttattttttttatttttttttatatatgaataaggtattttatggtaggaattttgtttatatttgtttattttttatattagtattattgtttttattttgtatagttatttttgatgtaatattgaatttgttggaattgggttttttggtttttttttttgtttttttttaaattatttgttataatttagatttgttaaattataattattgtattgggttttttggatttttaaaaagtattttgtgggttgggtatagtggtttatgtttgtaattttagttttttgggaggtttgaggttgggagtttgagattagtttggttaatatggtgaaatttttatttttattaaaaatataaaaattagttaggtatgatggtatgtatttgtaattttagttatttaggaggttgagataggagaattattggaatttgggaggtagaggttgtagttagttaagattgtgttattgtattttagtttggatgatagagtaagattttgttaaaaaaaaaaaaaaaaaaaaagtattttgtgtgattttgatgtattttaatttttgagaagtatttttttttattggaagtagagtatatatttgattttgattttttttatataataaattgtttagggttattagaaagtattataatttattggttttttttaatttgttttttagagatatttttagttttatttttattttttttttttagatttttattattttagatttttattatttttgttttgttttaagtttgtttttatttatttaaaaatatatggattattttatatggattgagtatgaaagaaatatagttttttaaagtaaattaaggagttgtttttagaggaaaggaaatggatggtggataggtaagaaaatgtggtttattagaattttatatggtgttgtatattgtgttgtatatatatatggtgtatgtgtatgtgtatatatgtgtatatgtatatattatatgtatatatattatatgtgtgtatatggtgttgtaggtatatatatgtgtatgtatatattatatatatgtgtatgtatatattatatatatgtgtatgtatatattatatatatgtgtatgtatatattatatatatgtgtatgtatatattatatatatgtgtatgtatatattatatatatgtgtatgtatatattatatatatgtgtatgtatatattatatatatgtgtatgtatatattatatatatgtgtatgtatatattatatatatgtgtatgtatttatgtgtatgtataggtatgtatatatatgtatatgtatatatgtatatggtatatatatgtatatgtatatgtatatatgtatatgtatatatatatatgtgtatatgtatatatgtatatggtatatatatgtatatgtatatgtatatatgtatatggtatatatatgtatatgtatatgtatattgttaatttttattttttgaatttgttttgttatttagtttttatttttgtgtttttgaatagtttataatgttttttatatttttaagggtttttttattttttatttatttttaatatttagtttaaatattgattttgtgtagttttttttaatggttttgagtattttgtggttttgtttagttatttatatatgttaggattagattattttttttaaatgttattttgttagatttgattttttattttattgagaaggtatttaagtgtgtatatttagagtttagtatttgtttggaatatgtgagtttgttaaggatatgttttgattgagtgaagtttattagtataaagttatttgggtataggtattttgttgtgggataaaatgtaatatttgtgaattttgggttgggaaattatgtggtaatttatatttaataggttagagatattttagagataagttgtttaatttatttatgttttttttgttgttttgtttgttttttagtgatttttagtgattgtaagggaaatgataagttatgttatgaggttttaagtttatattttaaggtgaatagtgatggtggtttagttgttttgagaaatataattgtagtgggtaaaattttgtttgtttatgtatggattttttatgtggaagatatggtagaatttgtgattgttggggggaaagatatttagggttttttgtaggtaatatatttgtttgagataatttgggtttaaggaggatattaggttttgtttgttttatgtggaaaatgggtttttaatttattatgttggttaagattttttttgttattgttgttgtaaatgatagaaatttaatttaaaaaatgtagatgaggggtagtgggaattaattgatttatgtaattaattgaggtatagtttgtggattaatttatggaattattttagggatatttttgtttttaggtgtggttgaagttgtttaaattagttttaatttttgtgtat

SEQ ID NO: 249 - DNA, 2501 bp, Artificial Sequence
  chemically treated genomic DNA (Homo sapiens)
atgtatagggattaaagttgatttggatagttttagttatgtttgaaggtagaagtatttttaaaatagttttatgaattaatttatgaattatgttttaattagttatatgaattaattaatttttgttgttttttatttatattttttgagttggatttttgttatttgtaataataataataaaaggaattttagttaatataataaattaaagatttattttttatataagatagatagaatttaatgttttttttgaatttaagttattttaaatagatgtgttatttgtaaggagttttggatgtttttttttttgataattatgagttttgttatattttttgtatggggggtttgtgtatggatgaatagagttttgtttattgtagttatgttttttagagtaattaagttgttattgttgtttattttgaagtatgggtttgagattttatagtgtagtttgttgttttttttatagttattgaaggttattgggaaataaatgaaataatagaaggagtatgagtaggttgggtagtttatttttgagatatttttgatttattaagtgtgaattattatatagttttttaatttagagtttataaatgttatgttttattttatagtaagatgtttgtgtttaagtgattttgtgttgatggattttatttaattaagatatgtttttgatgaatttgtgtgttttaggtaggtgttaagttttgagtgtgtatatttgagtgtttttttagtggagtgaagagttagatttggtagagtgatatttgagggaagtgatttaattttggtatgtgtgggtgattgagtagaattatagggtgtttaggattattgaggagagttgtatagagttaatatttgagttgggtattgaagataagtaggagatgagaaggtttttaagaatgtggaagatattataggttatttaaaggtatagggatgagggttaaatagtaaaatagatttagggaatgagaattaatgatgtgtatatatatgtatatgtatatattatatatgtgtatgtatatatatgtatatgtatatattatatatgtgtatatatatatatgtatatgtatatatatatatgtgtatatatatatatgtatatgtatatattatatatgtgtatatatatatatatatatatatgtttatgtatgtgtatggatatatgtgtatgtatatggtgtatatatgtgtatgtatatggtgtatatatgtgtatgtatatggtgtatatatgtgtatgtatatggtgtatatatgtgtatgtatatggtgtatatatgtgtatgtatatggtgtatatatgtgtatgtatatggtgtatatatgtgtatgtatatggtgtatatatgtgtatgtatatggtgtatatatgtgtatgtatatggtgtatatatgtgtatgtatatatttatagtattatatatatatatatggtatatgtgtatgtaatgtatatatgtatatatatgtatatatatgtatgtattatatatgtatatagtataatatgtagtattatatagaattttagtgggttatatttttttgtttatttattatttatttttttttttttgaaaatagttttttaatttattttgaggaattatattttttttatgtttagtttatatggaatagtttatatgtttttaggtgaatagaggtaaatttaaaatggggtagggatggtgggaatttagaatggtggggatttagaagggaagggtggaaatgaggttgaaaatgtttttgggaaataagttgggaaaagttagtaagttatggtgttttttggtagttttggatgatttgttgtgtggagagagttaagattaggtgtgtgttttgtttttagtgaagaggagtgttttttaaggattggggtgtattagaattatatagggtgttttttttttttttttttttttaatagagttttgttttgttatttagattggagtgtagtggtgtgattttggttgattgtagtttttgttttttgggttttagtgatttttttgttttagttttttgggtagttgggattatagatgtatgttattatgtttggttaatttttgtatttttagtagagatgggggttttattatgttggttagattggttttgaatttttgattttaggttttttaaagaattgggattataggtgtgagttattgtatttggtttatagggtattttttaagaatttagaggatttaatataatgattataatttggtagatttgggttatagtaagtgatttaaagaagggtaggaagagaggttaagagatttagttttaatgagtttagtgttgtattaaagatggttgtataaaatgaaggtagtggtgttgatatggagagtggatagatgtgagtaaagtttttgttatggaatattttatttatgtgtgggaaggaatagggaagatgggtt

SEQ ID NO: 250 - DNA, 8666 bp, Artificial Sequence
  chemically treated genomic DNA (Homo sapiens)
ttgtagggttttttttagtttaaagaaagtaattaggtgtttttattgtgttatgatttttatttttagttgggttttttagtttggttttaaagaataaaataaaaggtttttttgtttgagttttatttaatttattttttttatttataagaggtattttaaatttttatgatttttaaattttttaattgattattttatttttattttgtaaataagttaatttttttatttatagaaggaagtgttttaattttttttttgttttgatttttttttttttttaaatttatgtattttttgtgataaaatttataattattgttgtattttgagttttatttttttattatttttgagggattttaagtttttaaaaatattttattttgtttgtgtatttaattttttttttatttttttttaatttttttttttttttatttggtatttgtttttttaggtatatgtgtgtttaggttttttttattttttatttgttttattttatggtatagggttttgaattattataattaagttatgaaagagtagttaatgtagtgtttttatttttttgttattttattattttagttttttttttggttttttgaggagttttttataggttggtttttaggaataagtttaaatgaattatttttagtttttttaaatttttatgtttttgtatatttttttatttttgtttagaatattttttttttttttttttatttttaaatttttatattattttttaagattgggattagtttttagtatttggaagtttttgtttattagagataaatgagaatgagtttggttatttttttatttttttgtattattttgtgttttattttgtttttttaagagtattatatgttttatttaatttttaaataattgtttgaggtaagtatagttattattttaattatgtaaatgagaaaatagaggtttagatatgttgagtaattttgataaaagttaaagaattaataagtggaatagttgaggtttgaattttggtagtttgattgtagagatattatgtttgatttatttttttttgtttttattttatgtttgtttttagtttttgagtttgttgaatgaatgaataggtggtagtttttttttgttataagattgattagaattaagataggtttaaattttatgtgtagaatttttaaaattgtaaaggtagtgtaaatttaaaaaaagaatggtatttttaggaaagaggaaaagtaagtgtgagaataataataataataattaataaattttagtaaatttagtaaatgtagtaaatttttatattaaaagtttttggatatatattattatattttatggttatatgaaatatattataattttattttgtatataggaaatttgagattggtataaggagtatagagatttaggattttatatttttatttttttaggattttgtattttaggttgatatgtatgagtaaattgggagtataatgggttttttaatagaaaaattaggaaagtttttttattattattaattatttatataatatttttttaattttattattatttatattttaagttttagagtatatgtgtataatgtgtaggtttgttatatatgtatatatgtgttatgttggtgtgttgtatttattaatttattatttagtattaggtatattttttaatgttatttttttttttttttttttatataagatttataatggataatggattttaatttttagagtaaaatggttttatttaaggatgttataatttttttagagttttattgtaagatatgagatatatatatttaaaatttgtttttggtatttttaaagtagttaatttttatatttgtttataatgtatttaaatgttgtttttatatggttgtattttttattttttttattaatagttatatatattttttataagagttgaaagagtttttgatgtaggaatttatggtagagttttagagaaatttttgaatttattgaaagttttatttagaaatatatgtgtaagtgaatatattttttttaaaaaaaattattatttatttttttttttgagaagaaggtatttattttaatagatttttgaaggagtttattttttttatttttttatttttattaagaattattgtaggttgggtatgatggtttatgtttgtaattttagtattttgggaggttaaggtgggtggattatttgaggttaggagtttgagataagtttagttaatatagtgaaattttgtttttattaataatataaaaattagttgggtatggtagtatgtgtttgtaattttagttatttgggaggttgaggtaggagaattgtttgaatttgggaggtggaggttgtagtgaattgagagagattgtgtggtgttattttattttagtttgggtaatagagtgaaattttattttaaaaaaatatataaaataaataaataaaaagaaagaattattgtattagtgatggaaatgtgtttttttttttttattttggtaattatttttttttttttttattataaaatattttaaattaaattaaaataattttatttattgatagtttgaattttttttattattgttatatagttaattgagaggtattttgaggaaaatataaatggtatagtaatgtattgtagattttaataatatatttgatattttaaattgtttttattggttttattttaaaaattatatgttttaaaattaagtagatattaaaagtataagatatattgggtttataaggtttaagttaattagggattgaaatataatttttaaatagagttggattatttagtaggtagattaagtatgtgtttaaggtattagtaaagtttgagtaatttattttttaaaatgtagtatatgtttttgataagtttaaaaagtagtagttataggaaaaattagaatttttatttttttgtgtttgttatattttttagtgttgtttaatttttttttgtaagtgagggtggtggagggtgtttataatttttttagggagtaagttttttttggttttttttttttttttttttttttttttttttgagattaagttttgtttttgttttttaggttggagtgtaatggtgtgattttggtttattgtaatttttgtttttttttgggtttaagtgatttttttatattagtttttgagtagttgggattataggtatgtgttattaagttttgttaattttgtattttttagtagagatagggttttgttatgttggttaggtttgttttgaatttttggttttaggtgatttgtttgttttggttttttagaatgttgggattatagatgtgagttattgtatttggattttttttttatgtaatagtgataattttatttaaagtatttttttttttttttgagttggagttttattttgttatttaggttggagggtggtggtgtgattttggtttattgtaatttttgttttttgggtttaagtgatttttttgttttagttttttgagtagttggaattatatatgtgtgttattatggttagttaatttttgtatttttagtagagatggggtgttattattttggttaagttggttttgaatttttgattttaggtgatttgtttgttttggttttttaaagtgttgggattataggtgtgagttattgtgttttgttttaaagtattttttttttatgttttaaaataagattgtaagttagtttttaaagtggataatttaagagttaataggtattagtttaggatgtgtggtattgtttttaaggtttatatgtattaatatattatttaaatttataataatttttataaagtagggggtatttatatttttttttttttttataattatgaaaaatgtaaggtatttttagtaggaaagagaaatgtgagaagtgtgaaggagataggatagtatttgaagttggtttttggattattgtgtaattttgtttttagaatattgagtattttttttggtttaggaattatgattttgagaatggagtttgtttttttaatgattttttttttatttttttatttgtttataggtagaatttttttttgtttgtattaaataaattttatttttttagagtttgtttttatattaggtaatgtatatgtttgagaaatttttgttttagatagttgttttatatgtaggaggggaaggggaggggaaggagagagtagtttgattttttaaaaggaattttttgaattagggtttttgatttagtgaattttgtgtttttgaaaattaagggttgagggggtagggggatattttttagttgtataggtgattttgatttttggtggggtttttataattaggaaagaatagttttgtttttttttatgattaaaagaagaagttatattttttttatgatattaaatattttgatttaatttggtagttaggaaggttgtattgtggaggaaggaaatggggtgggggtggatttttttttaatagagtgaatgtatttaaatatgtttttgttggtaggtgggggagtgtggttgggagtagggaggttggagggtggtgtggggggtaggtggggaggagtttagttttttttttttgttaatgttggttttggtgagggttgtttttggttggtgtttttgggggagatttaatttggggtgattttaggggtgttatatttgttaagtgtttggagttaatagtattttttttgagtatttgtttatggtgtttttttgtttggaaagatattgtggtttttttagaggatttgagggatagggttggagggggtttttttgttagtattggaggaagaaagaggaggggttggttggttattagagggtggggtggattgtgtgtgtttggtggttgtggagagggggagagtaggtagtgggtggtggggagtagtatggagttggtggtggggagtagtatggagtttttggttgattggttggttatggttgtggtttggggttgggtagaggaggtgtgggtgttgttggaggtgggggtgttgtttaatgtattgaatagttatggttggaggttgatttaggtgggtagagggtttgtagtgggagtaggggatggtgggtgattttggaggatgaagtttgtaggggaattggaattaggtagtgttttgattttttggaaaaaggggaggttttttggggagtttttagaaggggtttgtaattatagatttttttttggtgatgttttgggggtttgggaagttaaggaagaggaatgaggagttatgtgtgtatagattttttgaatgttgagaagatttgaaggggggaatatatttgtattagatggaagtatgttttttattagatataaaatttatgaatgtttgggataaaaagggagttttaaagaaatgtaagatgtgttgggattatttagtttttaatttatagatatttggatggagtttattttttttattaggagggattattagtggaaatttgtggtgtatgttggaataaatattgaatataaattttgattgaaattatttagaagtggttgggtgtggtgttttatgttttgtaatttttttattttgggagattaaggtggggggaattatttgaggttgggagtttgagattagtttggttaataggtgaaattttgtttttattaaaaatataaaaagtagttgggggtggtggtaggtgtttgtaattttagttatttgggaggttgaggtaggagaattgtttgaatttgggaggttgaggttgtagtgaatagtgagatggagttattttattttagtttgggtgatagagtgagattttgttgaaagaaagaaagagagaaagagagagagaaaaattatttagaagtaattatatattgtgtttatttttaattgagtagggtaaataaatatatgtttgttgtaggaatttaggaaataatgagttatatttatgtgattattttagaggtaatatgtagttattattttgggaatatttgttaatatttttgtttttttattatttttagtttatttgatatagtttatttgtgataagagtttttaattttttatttttgaatagaggtgttttttttttttttatttttgttttgtgagggagttaggggaggatttaaaagtaattaatatatgggtaatttagtatttttaaaattttgttaatagtttgaatttgggagtttggttttgtagttttataatattttagaagagattttatttgtttaaaaataaaaaggaaaaagaaaagtggatagttttgataatttttaatggagaagggagaagaatatgtagaaaaggggaaatgatgttggtttagaattttaattatattggtgtttaatataggaatatttatttatataatattttaaagtattaaatttatattagtatattattaaatggatatattattaaatgggtttaagtattttatatattttaatttaattgatttattttttttttgttttggatttttattatgatttaaatatttatatatgggttattttttagattttttatattatgaaatataagaaaaatttttaaggttagttttatgattaagatgaaggattttattgaatatataaaataataaatatattgtaatattttgtttttttttttgtagttgtaatttggtttgtttatattttttttttgtttttttgaaaattgagttagttttatttttttaggataggatttaataattataatataatttagtataattttttgatttaggtaaattatgtaatttgtgtttagtatgaaatgtatttaaaaataagtaatttttttttaatattattatttttaaattaatataataaataatagttattttaaaataaattgtttatttttattatgtagtatttaaattttaaggttgttatgattgtagatagtattttaaaatttttttttggaaatggttttgtttttaagatgatttaggaattaaagaggtgattattttttgtttaatgaatttttaaattataaatttgggaagtgttttagttttttattgttgttgttataaattattataaatgtgttagttaaaataaatataaaattattattttatagttttagagattagaagttaaaaatgggtttataaggttttattttttttggaaattttaaggggtaatttgtttttttgttttttttagtttttagtgattattaaattttttggtttatggtttttgtattttttttgtggtttgtgtttttatttttgtattttttttttgattgtgattttttaataaaaatatttggggttatgttgggtttattttgaaaattttggataattttttttaagattattaattaaattatatttgtaaagttttttttgttatataagttaatgtattaaaagtttttgaggattaggatatagatattgggggtgggggggtattatttagtttattataggaaggaattttagggttaattaaattagtttttttattttatatttgaagaaattgaagttttggaattggagagtattatgttaaatgaaataagttaaatatagaaagataaatattatatgtttttatttatttgtgaaatataaaataattatatttttagtagtaaagagtagaatggtggttattagagttggggggtgggaggaatggggagatggtaattaagatataaagttttagttaagatgggaggaataagtttgattgttttttttgagatgtgttttatagtatgatgaatatagttaaatagtaaattttaaatgtttttatttgataaaaatgttaaatatttgagatgatggataggttatttagtttgatttaataattttttattgtgtttaaagattataattttatattgtattatataaatatatataattgtattattttaatatataattttaaaattaatataatgaaaaagaaattgaagtttaatatttttagaagttaagtgtaatttaaaagttttgtgagaatttgttttaataaataaataagttttttttttttaataattattatattttgtgtttggatatatagtagtgaataaaaaaaaaaaaaaaaaaaaaaatttttaggtttaatataattttaggaagaaattttagtagttgtattttaggggaaatataggaagttagtttggagtaaaagttagtttgtttttgtttttttgttattttgtttgtgttttatagtgttttttgtttgtgatgatagttttgtagaagtttggaggatataatggaatttattgtgtattgaagaatggatagagaatttaagaaggaaattggaaattggaagtaaatgtaggggtaattagatatttggggtttgtgtgggggtttgtttggtggtgagggggttttatataagttttttttttgttatgttggtttttattttggttttgattattttgttttttttggtagg

SEQ ID NO: 251 - DNA, 8666 bp, Artificial Sequence
  chemically treated genomic DNA (Homo sapiens)
tttgttagagagaatagaatggttagagttagggtgggggttggtatgatggaaaggaagtttgtgtagagtttttttattgttaagtagatttttatataagttttaggtgtttaattatttttatatttgtttttagtttttaattttttttttgagttttttatttattttttagtatataatgaattttattatattttttgaatttttgtggagttgttgttataggtagagagtattgtgaggtatgggtaaaatagtaaaggggtagggatagattgatttttattttaggttaattttttgtattttttttgagatataattattgaaatttttttttgaaattatgttaggtttggagatttttttttttttttttttttttgtttattgttgtatatttaagtgtagaatgtggtaattgttaaaaagagaaaatttgtttgtttgttaaaataaatttttataaaatttttaagttatatttagtttttgggaatgttgaattttaattttttttttattatattagttttaaaattatatattgggatagtatagttgtatatatttatgtggtataatatgaagttatgatttttgaatataatggggaattattaagttaagttaagtaatttatttattattttaaatatttgatatttttgttaaatgagagtatttgggatttattatttagttatatttattatgttatgaaatatattttaaaaaaaataattaaatttattttttttattttaattgaggttttatattttgattattatttttttattttttttattttttagttttagtaattattattttattttttattgttaagaatgtaattgttttatattttatagataagtgagaatatgtgatatttgtttttttgtgtttggtttattttatttagtataatgttttttaattttaaaattttaatttttttaagtataaaataagaaggttagtttaattaattttaaaatttttttttgtggtaggttgaataatgtttttttatttttaatgtttatgttttaatttttaaaaatttttaatatattaatttatgtggtaaaagaggttttgtagatgtgatttaattaatggttttgagggagattatttagaatttttagggtgggtttaatataattttaagtgtttttattagagggttatagttagagagaagatataagaatggaagtataggttatagagaaaatatagagattatgagttaaggaatttgatggttattagaagttggaaaagataaggaaatagattgttttttagagtttttaaaaggaatgaaattttgtggatttatttttgatttttgatttttagaattgtaaaataataattttgtgtttgttttagttaatatatttgtgataatttgtaatagtagtagtaggaaattaaaatattttttaggtttatgatttgagagtttattaaataagagatggttatttttttggtttttaaattattttggaaataaagttatttttagagaggaattttaaaatattgtttgtagttatagtaattttaaaatttgagtgttgtatggtggaagtagataatttattttaggataattgttatttgttatattagtttgaggatggtggtgttaaagaggagttatttatttttaggtatattttatattaaatataaattgtataatttgtttaaattaaggaattatattaaattatattatggttattaaattttgttttgagaaagtgaaattgatttagtttttaaagagataaagagaaagtataagtaaattaaattgtagttataaaaagaaagataaaatgttgtagtatatttattgttttgtgtatttaatgaagttttttgttttggttataaaattagttttaaaggttttttttatattttatagtatgaaaaatttaaaaagtaatttatatgtaaatatttaaattatgatagaaatttaaagtaaaaagaaaatgaattaattgaattaaaatgtgtaggatgtttaaatttatttgataatatatttatttgataatatattaatatgaatttagtattttaaaatgttatataaataaatgtttttatattaaatattaatgtagttaggattttaagttaatattatttttttttttttatatgttttttttttttttttattaaaaattgttaaaattatttattttttttttttttttttgtttttaaataaataaggttttttttaagatattgtaggattataaagttaaatttttgggtttaagttgttggtaaaattttagagatgttaagttatttatgtattaattatttttaaatttttttttaatttttttataaaataggagtagggagaggagaaatatttttgtttaaaaatgaggaattgaaaatttttattataaataaattatattaagtaagttaaagatagtaaaagagtaaaaatgttagtagatatttttaaaatggtaattatatattatttttggaatgattatatgaatgtggtttattattttttaagtttttatagtaaatatatatttatttgttttatttagttaaaaataaatataatatgtagttgtttttgaataattttttttttttttttttttttttttttttttttgataaagttttattttgttatttaggttggagtgaagtggttttattttgttgtttattataattttagttttttgggtttaagtgatttttttgttttaattttttgagtagttgggattataggtgtttgttattatttttggttattttttgtatttttagtagaggtgaggttttatttgttggttaggttggttttgaatttttgattttaggtgattttttttgttttgattttttaaagtgaagggattataaggtgtgaggtattgtgtttggttgtttttgaataattttgattaaaatttatatttgatatttattttaatatatattatagatttttattgataattttttttagtaagaaagataagttttatttaggtatttgtgaattggaggttaagtagttttagtatattttatatttttttaagattttttttttattttaaatgtttgtaaattttgtatttgataaagagtatatttttatttaatataaatatgtttttttttttagatttttttagtatttgagagatttgtatgtgtgtggttttttattttttttttttggttttttaagtttttagggtgttgttaggaggaggtttgtgattataaattttttttgaaaattttttaggaagttttttttttttttggagaattgaagtgttatttgattttaatttttttgtaaattttgttttttagagttgtttgttattttttgtttttgttgtagattttttatttatttggattggtttttgattgtaattatttggtgtgttgggtagtgtttttgtttttagtagtgtttgtattttttttatttgattttgggttgtggttgtggttagttagttagttgaaggttttatgttgttttttgttgttggttttatgttgttttttgttgtttgttgtttgttttttttttttttgtagttgttgagtgtatgtggtttgttttattttttggtgattagttagttttttttttttttttttttggtgttggtggaagagttttttttgattttgttttttaaattttttggagggattgtggtatttttttaggtaaggggatgttgtgagtgagtgtttggaggaggtgttattaattttgagtatttagtgaatgtggtatttttgaagttgttttaggttgggttttttttgggggtattagttggaagtagtttttgttagagttagtgttggtaaggaaggaggattgggtttttttttatttgttttttatattgttttttggtttttttgtttttagttgtgtttttttgtttgttagtaaaggtgtgtttgagtgtgtttattttgttaaaaagaaatttgtttttgttttgttttttttttttgtgatataatttttttaattgttaaattgaattggggtgtttggtgttatagggaaagtatggtttttttttttaattataagaaaaagtaaaattatttttttttagttgtgagagttttattgagaattgaaattatttgtatgattagaaagtgtttttttatttttttaatttttgatttttaggagtgtggggtttattaagttagaaattttagtttaaaggattttttttggagagttggattgtttttttttttttttttttttttttttttgtgtgtaaaatggttgtttggggtaagggttttttagatgtgtatattgtttggtataagagtagattttgaaaagatgaggtttatttaatatggatgggggagaattttgtttgtaggtagataggaaaatggggagggagttattggaaggatggattttatttttaaagttataatttttagattagaaaaagtgtttagtgttttagaagtagagttgtatagtgatttaaagattagttttaaatattgttttgttttttttatattttttatattttttttttttattgaaaatattttgtattttttgtaattataaagggggaagggaatatgagtgttttttgttttataggggttgttgtgagtttaaatgatgtattaatatatataagttttaagaatagtgttatatattttaagttaatatttgttagtttttgaattatttgttttgaggattggtttgtaattttgttttgaggtatagaaagaaaatgttttggagtaggatgtggtggtttatatttgtaattttagtattttgggaagttgaggtgggtagattatttgaggttaggagtttgaggttagtttggttaaaatggtgatattttgtttttattaaaaatataaaaattagttggttatggtggtgtatgtgtgtaattttagttatttaggaggttgaggtaggagaattgtttgaatttgggaggtagaggttgtagtaagttgagattgtgttattattttttagtttgggtgatagaatgagattttgatttaaaaaaaaaaaaaaatgttttggatagaattattattattatataaaaggaaagtttggatgtggtggtttatgtttataattttagtattttgggaggttgagataggtggattatttgaggttaggagtttgagataagtttgattaatatggtgaaattttgtttttattaaaaaatataaaattagtggggtttggtggtgtatgtttgtaattttagttatttggaggttgatgtaggagaattgtttgaatttaggagaaggtggaggttgtagtgagttgagattgtgttattgtattttagtttgggagataagagtgaaatttggttttaagaaaaaaagaaagaaagaaagaaagaaagattaagaagaatttattttttgaaaagattatgggtattttttattatttttatttataaagaaaagttaaatagtattaaagagtataataagtgtaaggaggtaaaagttttaattttttttgtgattattattttttaagtttattaaaaatatgtattatgttttaaaaaatggattgtttagattttgttgatgttttaagtatatgtttaatttgtttattggataatttagttttgtttaaaagttatattttaatttttggttgatttaaattttgtagatttagtatattttgtatttttagtgtttgtttgattttaaaatatgtagtttttaaaatgaagttaatgaaaataatttgggatgttaagtatgttattaaaatttataatgtattattgtattatttatattttttttggggtattttttaattagttgtgtagtaatgatagggaaaatttaaattattgataaataaaattattttagtttagtttaagatattttatgatggaggaggaagaaagtggttgttaggatgggagggagggaatatatttttattattaatataatggttttttttttttgtttgtttgttttgtgtgtttttttgagatggagttttgttttgttgtttaggttggagtgaaatggtattgtatgattttttttggtttattgtaatttttgttttttgggtttgagtaatttttttgttttagttttttgagtagttgggattataggtatatgttgttatatttagttaatttttgtattattagtagagatggggttttattatgttggttaggtttgttttgaatttttgattttaggtgatttatttattttagttttttaaagtgttgggattataggtatgagttattgtgtttggtttatagtggtttttaatgggggtgggagagtgggaagagtaggtttttttaagagtttgttgaaataaatattttttttttaaaaaagaaagtaggtaatgattttttttaaaaaagatgtgtttatttgtatatgtatttttagataaaatttttagtgaatttagggatttttttgaaattttattatggatttttatattaagaatttttttagtttttgtgaaaaatatatatagttattggtgaagaagatgggagatgtaattatataaaaataatatttggatgtattataaataggtgtaaaagttgattgttttggaaatattaagaataagttttagatatgtatattttatattttgtagtagagttttggaaggattatggtatttttgggtggggttattttgttttagaaattgaagtttattatttattataaattttatgtaggggggaggggggagggatagtattaggagatatatttaatgttaaatgatgagttgatgggtgtagtatattaatatggtatatgtatatatatgtaataaatttgtatattgtgtatatgtattttaaaatttaaagtataaataataataaaattaaaaaaatattatgtaaataattaataatagtgggaaaatttttttagtttttttgttaaagagtttattatatttttagtttatttatatatattgatttgaggtgtaaaattttagaagaatgaaaatataaagttttggatttttgtgttttttatgttagttttagattttttatgtgtaaaatgggattataatatattttatgtggttataaaatatgataatgtatgtttaaaagtttttaatgtaaaaatttattatatttattaaatttattaaagtttgttggttattgttattattatttttatatttatttttttttttttttgagaatgttattttttttttagatttgtattgtttttgtagttttgaaaattttatatgtgaaatttaaatttgttttaattttgattagttttataataaaaaaagattattatttgtttatttatttaataagtttagaaattaagggtagatatggggtgggggtagaggggagtaggttaaatatagtatttttatagttagattgttagggtttaaattttaattgttttatttattggttttttaatttttattaaagttatttaatatgtttgggtttttgtttttttatttgtatgattaggataataattgtatttgttttaaatagttgtttagggattaaatgaagtatgtaatgtttttagaagagtaaaataaagtatagaatgatataagaaaatgaaaaggtgattaaatttatttttatttgtttttagtaggtaaaggtttttggatgttgagagttgattttagttttgaagaatgatgtgagagtttaaagatggaaaagaaggagaaagatattttaggtagaggtaagaggatgtgtaaaggtatagaagtttaggaaaattgaaagtaatttatttagatttatttttgaaaattagtttgtgaaggattttttagagagttaaaagaaaaattaggataatgggatggtaaggaagtggggatattgtgttgattatttttttatagtttggttgtgatagtttaaggttttatgttatgaagtgaggtagatggaaggtggaggagatttgagtatatatatatttggaagggtaagtgttaagtgaagagaagggaaagttagaaaagaataaaagaaaagttaagtatataggtaagataggatatttttgaggatttgaggttttttaaaaataatgaagaaatagaatttaaagtatagtggtggttatagattttgttataagagatatatagatttgggagggagaaaaggttagaatggggaggaagttgaggtatttttttttatgaatgaggaggttagtttgtttgtagagtgaaaataagatggttggttaggaagtttgagaattgtaaaggtttggaatattttttatgagtagagaggatgggttgagtaagatttagatagagaagttttttgttttgttttttaaaattagattggagaatttagttgagggtggagattatgatatagtagggatatttgattattttttttaaattaaagaaagttttgtag

SEQ ID NO: 252 - DNA, 4101 bp, Artificial Sequence
  chemically treated genomic DNA (Homo sapiens)
ttttttattttttattgttatttatttagtgttgtgtagtagtttagttgtgtgtttgttgggaggggttgttaagtgttttgtttattggttgttttttgaatttttgttattttatgtataaatatatttatatattttttttgtttagtttatatattgagttatttgtatatgtgagtatatttttttttttttttttatttttttggtttttgatttttataagtttatggaatatttttggaaagatgtttttgatttagtagggtaggtttgttttgatttttttttttgtagttttagtattttgagaaagtaatttatttttttggttagtgtttgtattttagtagggagatgaggattgttgttttttatgggggtatgtgtgtgtttttttttttttttaggatttgtaggattttttgtgttatttgtatataatttggtaggtttatattttttaagagttttatgaagtgttttttgtatgtgttttaaaaaggtatttgaaaattgaaagtgtgatttatggaaattaaattatttgtaaaaaattgttttggaaagtaatgattgttggttataaagggaaatatttgtgatgtatttaatgtgtttttaattttttatttgttgataatttatagttattaatgttaaatttgattttggttttagttatatttgtatattgtttaataatggtttatttttgtaagaattagataaaatgtatatttgatataaaatagttaaaaatgtaatttttagtaatagtaagtttggtatttagatagattatgaatattttgttagatattttgttgggtgtttgggatagtaattaaaataaagtattgatagttgtattagagtttattaggttgtagtaaaggaagtttatttaaaagtataaattatttaagattatagatgtatgatatattttatttattttttgtttttttaatatgtatatatatatatatatatatatatatatatatatatgtgtgtgtgtatgtgtgtgtgtatgtttaatttttaatttagttaaaaatttttttttatttgttttttatttggatatttgattttgtatattttagtttaagtgaattgagaagattgagttgtaggattaaaggatagatatgtagaaatgtattttaaaaatttgttagttggattagattgataatgtaatataattgttaaagttttggtttgtgatttgaggttatgtttggtatgaaaaggttatattttatatttagttttttgaagttttggttgtataattaatttgtggaaggtatgaatatttatgtgtgttttaattaaaggtttttttgaattattttttatatgagaatttttaatgggattaagtatagtattgtggtttaatataaatatataagttaggttgagagaattttagaaggttgtggaagggtttatttattttgggagtattttgtagaggaagaaattgaggttttggtaggttgtatttttttgatggtaaaatgtagttttttttatatgtatattttgaatttttgtttttttttttttagatgttttttgttagtttttttagttgttaaatatagttgtttgtggttggttgtgtatgtaattgtatattttattttatttgttttattttggttatagtgtagttttttttagggttattttatgtatatattatgtatttttagttaatgaggagggggaattaaatagaaagagagataaatagagatatattggagtttggtatggggtatataaggtagtatattagagaaagttggtttttggatttgttttttgtgtttattttaagtttagttttttttgggttatttttagtagatttttgtgtgtttttgttttttggttgtgaaatttagtttttatttagtagtgatgataagtaaagtaaagtttagggaagttgttttttgggattgttttaaattgagttgtgtttggagtgatgtttaagttaatgttagggtaaggtaatagtttttggttgttttttagtatttttgtaatgtatatgagtttgggagattagtatttaaagttggaggtttgggagtttaggagttggtggagggtgtttgttttgggattgtatttgtttttgttgggttgtttggttttattggatttgtaggtttttggggtagggttggggttagagtttgtgtgttggtgggatatgtgttgtgttgtttttaattttgggttgtgttttttttttaggtggtttgttggtttttgagttttttgttttgtggggatatggtttgtattttgtttgtggttatggattatgattatgattttttatattaaagtatttgggatggttttattgtattagatttaagggaatgagttggagtttttgaattgtttgtagtttaagatttttttggagtggtttttgggtgaggtgtatttggatagtagtaagtttgttgtgtataattattttgagggtgttgtttatgagtttaatgttgtggttgttgttaatgtgtaggtttatggttagattggttttttttatggttttgggtttgaggttgtggtgtttggttttaatggtttggggggtttttttttatttaatagtgtgtttttgagtttgttgatgttattgtatttgttgttgtagttgttgttttttttgtagttttatggttagtaggtgttttattatttggagaatgagtttagtggttatatggtgtgtgaggttggtttgttggtattttataggtatttgtgtttgtgttgtttgttggggtggttgttgtgtttggtaggagggagggagggagggagggagaagggagagtttagggagttgtgggagttgtgggatgtgtgatttgagggtgtgtgtagggagtttggggtgtgtggtttagtttgggggttttgtgtgtagtttgtgttgtgtttagagttaagtttttttgttgggtagttgaaaaaaatgtattttttatttatttattgtttgtgtgagaggtagatttgaaagtttgggttttttaataaaatatatgttggaaaattagataaagtagtagttatttgtgggggaaaatatttttaggtaaataaatatggggtgttttgagttatttgggaaggttttgtttttggtatttaaagttgggggtgtttggagttagtagagtttagtagagttttatttatttttttaatgtttttgtttaatgtgttttttaaatttttttttatttagattatttgattggaaatatgttagttatgatgatgattttttgggaagtgatttttgttatttgttttttttttttttttattttatgttttggggttttagagagtgattgggagttgaatgggtttgattttggagttagttggttgagtttgtgttggagtggattgttggtatgtgatttttgatagttggaaatttgtaggtgttttgtgagtttaaaataagttatatggaagtataagtgtttaaaaataattttttgttagtttagtgataagtttgttttatttggggagaatgttttggagtggtgtgtgggttagttagggtttgtgttttgtagttattgtggaaggagtgtggttggtttaggatataggagattattttgtgattttaatggtgaaggttgtgtgtttttattttaatttttttttttataagaattgttttttttttttttttttttttttttatttttttttgtttagtttttttttttgttttttgttttttgtttttttgatgggtttgtagagggattaggtgggtgtttttggtgaatatttttttaggtggttataggataggtgtattttggattgggtttggaagttttagggtgttatatggttgggttttgaattaggtattttttaattgtatattggtatttggattggtgtttttatatttttttgttttgtaagttgtggattagtttttgtttagtattttgtttttagggatatttatagtagaaggaaggggattaaagtgtagtttgg

SEQ ID NO: 253 - DNA, 4101 bp, Artificial Sequence
  chemically treated genomic DNA (Homo sapiens)
ttaaattgtattttagtttttttttttttgttataaatatttttggaaatagaatattgaataaaaattggtttatggtttataaggtagaaagatatagggatattagtttggatattagtgtatagttgggaaatgtttaatttaggatttagttatgtggtgttttgaagtttttaaatttagtttggggtatatttgttttgtggttatttaggaaggtgtttattagaagtgtttatttaatttttttgtaggtttattaggaaaataaaaaataaaaaataaaaggagaaattgggtaagagaaaatgggagggagaggagagggagaaagaataatttttgtagggaaaaaaattaaaatgaggatatataatttttgttattgaagttataaagtggttttttgtgttttggattggttgtgttttttttatagtggttgtgaggtgtagattttggttgatttgtatgttattttggggtattttttttgggtgggataggtttgttattgggttggtaggagattatttttaagtatttgtgtttttatatggtttgttttaaatttgtgggatatttataaatttttggttgttagaagttatatgttagtaatttgttttagtgtggatttagttagttaattttgaaattagatttatttaatttttaattgttttttaaagttttaggatgtggggtggggaggaggggaaagtgggtgataggaattgttttttagaaagttattattatagttgatatatttttaattaaatagtttagatgaaaggaaatttggggagtatattaaataaaaatattaaaaggataaataaaattttgttgagttttgttaattttaaatatttttaattttaaatgttaagagtgagatttttttaagtgatttaaagtgttttgtgtttatttgtttggaggtgtttttttttataaataattgttgttttgtttggttttttaatgtgtgttttgttaggaagtttgggtttttgggtttgttttttgtatggatggtaagtgggtggagagtatgttttttttagttgtttggtgagagaatttgattttgaatgtagtgtgggttgtatgtagaatttttgggttgggttgtgtgttttgggttttttgtgtgtatttttgggttgtgtgttttgtggtttttgtagttttttaggttttttttttttttttttttttttttttttttttgttgggtgtggtggttattttgatgggtggtgtgggtgtgggtatttgtagaatgttggtgggttggttttgtgtattgtgtagttgttgggtttgttttttaggtagtagggtatttgttggttgtggggttgtaggaaaggtgatagttgtggtggtgggtgtagtagtattagtgggtttggagatatgttgttgagtggggggaaattttttaggttgttggagttgaatgttgtagttttagatttggggttgtaggggaggttggtttgattgtagatttgtgtgttggtggtggttgtggtgttgaatttgtaggtggtgtttttggggtagttgtatatggtgggtttgttgttgtttaggtatattttgtttaggggttgttttagggggattttgagttgtggatggtttaggggttttagtttgtttttttggatttgatgtagtagggttattttagatgttttggtgtggagggttatggttatggtttgtggttgtgggtagggtgtagattgtgtttttgtagggtagaaggtttagaaattggtgggttatttggaaaaagagtatagtttgaggttagaggtgatgtagtgtatgttttgttgatatgtgagttttggttttggttttgttttgggagtttgtgggtttggtgaagttgggtgatttgatgggagtaagtgtagttttaggatgaatgttttttgttagtttttgggtttttgggtttttaattttaagtattggttttttgagtttatatgtattataaaggtgttggaggatggttagggattgttgttttgttttgatattggtttaaatattattttaggtataatttgatttggagtgattttaaagagtagtttttttgaattttattttatttgttgttgttgttggatagaggttgagttttatggttagggggtgggggtgtatgaggatttgttaaaggtggtttagggaagattgggtttaaaataaatgtgaaagatggatttaggggttggttttttttaatgtgttgttttatgtgttttgtgttagattttgatatatttttgtttgtttttttttttgtttgattttttttttttgttggttagaaatatgtagtgtgtatataggatgattttggggaggattatattgtaattgagatagggtagatagaatggggtgtgtggttgtatatgtagttagttatagatagttatatttagtagttgggggaattgatagggggtatttgaggggaagggggtggagatttagggtatatatataggaagagttgtattttgttattaggagaatgtaatttgttaggattttagtttttttttttgtaaaatgtttttaaagtagatagatttttttataattttttgagatttttttagtttgatttgtgtgtttatgttggattatagtattgtatttggttttattaggaatttttatgtgaaggatgatttagaaaaatttttggttagggtgtatatgggtgtttatgttttttataggttggttatgtaattaaaattttagaaaattgaatataaaatgtgatttttttatattaaatataattttaggttatgaattaaagttttggtaattatgttatattgttggtttggtttagttaatagatttttaaaatgtatttttgtatgtttattttttagttttataatttgatttttttggtttatttgggttaggatatgtagaattaaatatttagatgaaaaataaatagaaaaaagtttttaattgaattaaaagttaaatatgtatatgtatatatatatatatatatatgtgtatatatatatatatatatatatatatatatattaaggagataaaaaataggtgaagtatattatgtgtttataattttggatagtttatatttttgaataaattttttttgttgtagtttaatagattttgatataattattaatattttgttttaattgttattttaaatatttaatagagtatttgatgaagtgtttatggtttatttaaatgttaagtttattgttattaagagttatatttttgattattttatattaagtatatattttatttaatttttataaaaatagattattgttggataatatgtaaatgtagttgaagttaaaattgagtttagtattaatgattatagattgttagtaaataaagggttaaaaatatattaggtgtattgtagatatttttttttatggttagtaattattattttttaaagtaattttttatagatgatttaatttttataaattatatttttaatttttaaatgtttttttaaaatatatgtaaaaagtattttatagggtttttaaaaaatgtgaatttgttaaattatatgtaaatggtataaagaattttataagttttgaaagaaaaaggagatatatatatatttttatggagaatagtaatttttatttttttgttaggatatagatattagttagaaaggtaagttgtttttttaaaatgttaaagttatagagagagaaattaaaataagtttattttgttggattaagaatgtttttttagaaatgttttatgggtttgtagaagttaagggttgagagagtgagaaggaaggaaggaatgtgtttgtatgtgtgagtggtttagtgtgtgaattaggtagagagagtgtgtggatgtgtttgtgtgtggaatggtagggatttgggaagtagttagtaggtagggtatttggtagttttttttggtagatatgtagttgggttattgtatagtgttggatgaatggtagtggggagtgagggg

SEQ ID NO: 254 - DNA, 2501 bp, Artificial Sequence
  chemically treated genomic DNA (Homo sapiens)
tatttgtggttttagttatttgggaggttgaggtgggaggattgtttgagtttaagaggttgaggttgtagtgagttgtgattgtgttattgtattgtattttagtttgggtaatagagtgagattgtttaaaagaaaattaagtggttttttattgattgtgtgttataatttttttttttttttttttttagagatgagattttgttatgttagttaggttgattttgaatttttggttttaagtattttttttattttggttttttaaagtattaggattataggtgtgagttattgtatttggttaattatgtgttatgattgttaaaagtaaatatatatatatagtgttgatttttaaaattttttttttaggagaagaagaaaaagaaatatagagataggaagttatttgattttgatagtttagattttgagagtgatataggtaagagggtaaggtatatattaaaagatagtaaggtagtaaagaagaagaaaaagaagaagaagtataagaagaagtataaggagtgagagtataaagagtgtagggggtggttgagagtaagaaattaggagttttgtgttttgagatttttggaaagatttaatagtgagaatatagttttttattttattaattttgtttttatgggagatggtttttttttatgtaataggtaggtttgggagttagaggttaaaagtagttgtttgaatgagttgttgtttttttattatttttggtttttttgtaagtgaattttgtagtttatttatttatttatttaattttttttatttagtaggaggttttattattttttttagttgttattgttagagttggatttttgtaaaggagtttaggttagagttatagagattgttgtggaggtgagtttggttgtagttagagtgattggattttttttattggtttgttttgggttaattggtgggtgatttttgttgtatttaatatgggagtagagattggtagtaggaggggggaatatggtgagaagtggtgtttattttttttattttttttaatatagttttattatgttagaagtggtatttagtggttatagttagaaaatagtttgtagtgtgatttaatttgtgtattgtattttagtagattattgaattagatagtgaagttaagattattgttttattttgtatttattattgtgtgaattagttgattttattttaggtttttgtttaaatttttgttattaaatggaaatgtgtttggttttaaatttattgagttattttttttataatttttttttttgggtaatttatagatttaaagttattgagtttgtattagttgataaaaatatttaatatgttattttagattttggagagatgtttagtagaggtatagagttaaaggtattagtagattattgtttttttgggagattatttataagtttttttttttgtaatgattagatgttttttttttttagagttgattagagaagtagtaagaatttgtagttataagtattagtttggtgtataggttagtagtttttttggttagtggttatttttttttattattatggtataagtttgggttttgtgttttgaatttgaattttggaaagggagagattatagtattttatagagaatagttagatttaagagtttttagtgtaggatgggtttgaagtgatagtttaatagttaaatttggggaagttttattattgattgaattaggttatttgattatggagggggggtagtgtaaaggtaatgtgtaggtatagtttttttattattaaatgtgtaaggtgattagttgattaataggttttgagattgtttattttagttttttatttagtgttttttttttagtaatttttaggttgttatttttgtttattttttgatatataggataaattaagatttttagagttatgttattaaaggtaaaaaggtaattgggtggttttggttttgttttattgattttagagtattttatgagtgtagttaaaaaaaaaaaaaaaaaattatatatattatgggaattggaattggattttggttagtggtatttgattttagaagaatttgtggatttgtataaaatgtagaggaagaaatgaggtaatgtggtgttgagttgaggggtagttgattggtagagtagtagttagtaatagtgtagttaggttatgttttttttttataagtgtgagtgtaaattgtagtgttgtgggtgagtgtttggaaggaaagatagagtgagatggggggtggagttaggaatattattgtgagtattttatttttttttttttttgataattgttatttgagtatttattatgtgttggttatatgtatgtatgtgtgtgtgtgtgtgtgtgtgtgtgtgtgtgtgtgtatatatatataattttttttttttgatatgtatagtaaatttttaagataggtat

SEQ ID NO: 255 - DNA, 2501 bp, Artificial Sequence
  chemically treated genomic DNA (Homo sapiens)
atgtttattttaaggatttgttgtgtatattagaaaaaaaaaattatgtatgtatatatatatatatatatatatatatatatatatatatatatatatatatagttggtatatagtaggtatttaagtgataattattaggaggaagggagggtagaatgtttgtaatggtgtttttggttttattttttattttattttgtttttttttttagatatttatttatggtattgtagtttgtatttgtatttatgagaaagaggtatgatttgattgtattgttgttgattattattttgttaattggttattttttgatttagtattatattgttttatttttttttttgtattttgtataaatttatgaatttttttggggttaggtgttattgattgggatttagttttagtttttatggtgtatgtggttttttttttttttttttaattgtatttatagggtgttttgaggttaataaagtagagttaaggttatttagttgtttttttgtttttggtaatataattttgggagttttggtttattttgtgtgttagagagtgggtagaaataatggtttgaaggttattgaggaagaagtattggatgggagattgaaatggatagttttggagtttgttaattagttgattattttatatatttaataataaaagagttgtatttatatgttgtttttatattgttttttttttatggttaaatgatttagtttagttagtgatggggtttttttaggtttggttattgaattgttattttaggtttattttatattgaaagtttttgggtttggttgttttttgtgaaatgttgtagtttttttttttttagaatttaggtttagggtatagaatttaggtttgtattatggtggtgggagaaaatgattattggttaagaggattgttgatttgtgtattaggttagtatttatgattataaatttttattgtttttttaattaattttgagggaagagggtatttgattattataaaagggagggtttataagtgattttttaagaaggtagtgatttgttagtgtttttggttttgtatttttgttgggtatttttttaaggtttaaggtaatatattaaatgtttttgttagttaatgtaggtttagtgattttaagtttgtaagttatttaggaagaaggattataggaaaaataatttagtaagtttaaaattaaatatatttttatttagtgataggaatttaagtaaggatttgaagtagaattaattgatttatatagtagtaaatataaagtagaataatgattttggttttgttgtttggtttagtggtttgttggaatgtaatatataagttaagttatattgtagattgttttttagttgtggttgttggatgttatttttagtatagtagaattatgttaggaggaatgggaaaagtgagtattattttttattatgttttttttttttgttgttagtttttgtttttatgttggatgtagtagagattatttattagttggtttaggatagattaataggaagggtttaattattttaattatagttgaatttatttttataatagtttttgtggttttagtttggatttttttataggaatttagttttggtagtggtagttggagagggtaataggattttttgttgaatgaaggaagttgggtgaatgaatgggtgagttgtagggtttatttgtaaagggattaggagtgataaggaaataataatttatttaggtagttgtttttgatttttaatttttaaatttgtttgttgtatgaggggaagttattttttatgggagtgaagttaatggggtgggaggttatatttttattattgagtttttttaggagttttaaggtataaggtttttggttttttatttttaattattttttatattttttatatttttattttttgtgtttttttttgtgtttttttttttttttttttttttttgttgttttgttgttttttgatgtgtgttttgtttttttgtttgtattatttttagagtttgagttgttagagttagatgattttttatttttatgttttttttttttttttttttgaaaagaaaattttaaaaattaatattgtatgtgtatatttgtttttaataattatagtatataattggttaggtgtagtggtttatatttgtaattttagtattttgggaagttgaggtgggaggaatgtttgaggttaggagtttaagattaatttggttaatatagtaagattttatttttaaaaagagaaaaaaagaaaaattatagtatataattaataggggattatttaatttttttttagatagttttgttttgttgtttaggttagagtgtagtgtagtggtatgattatagtttattgtaattttaattttttgggtttaagtaatttttttattttagttttttaagtagttgggattataggta

SEQ ID NO: 256 - DNA, 2501 bp, Artificial Sequence
  chemically treated genomic DNA (Homo sapiens)
tagaaaaagtattttaagataaaatttttataatttagtaagttttgggaaaaaggttaaagttttttagtttttatttgaaaatatttattgtatagaaaatttaggagaaaaaatttaatttaggtagttaagtttgaggtattgttattttatttaaatttgaatagggtattttaaaatgatatattggtttttataagaggaatagaaagaggtttgtagttatgtttataggtttatgtttttaggtaaattaaattagtttgatttttaaaaaatgagagagagatggtgaatagtggaaaaggtttaaaataaaatatgaaagatagtttttgttatagtatttgttatatttttttaggtaattgagtgtagagttgataaatttatgatatgggagaatgaaataagttttttagaatgtaaggatttgagtataatattatatttgaataataatagggggtaaggtagtttgggtttttaattatttagaatattttaaaaagagggttggggagagaaaggttaagtgtatatatatttaaagttatttagtaaagatttatttatattttaaggtgaaattagaatataatgaatgtgttttttagttaaaaattatgattattaagtggttgatataattttttttaattaattgttaatagtatttatttattaattttgttttttatttgtgtttgatttatttttgtaatttataatatgaatatatttatttataggttagatgaagaattgtttaattttaatttggaattatttaattttaaaaataaaaaagaaattatttataggagaggatttgtaattggggtttatgggagtttattaataggtttgttagaaaaaaatataagatattagttaaatttgaattttagataaataagtaatttttttagtttagatatatgttagtattgtatggtaattttatatttataaataaattttagagagatagatatattttttttttttttttttttgtttttttgaaattgagttttgttttgttatttaggttggaatgtagtggtatgattttagtttattgtaatttttgttttttaggtttaagtagtttttttgttttagttttttaagtagttgggattataggtatgagttattgtatttggttttttttaatattttttgtttataggttaaatattatttttagttattttagtagtttattatgtgaattgagattaggagggataatatagattgttagatagatttaggtatgagtttgttagatattgtataaaaatttggagtagaagtattttgataaggaaattggttatagttatttttttattagagttttaaatttatgattttttaatagttagttattattaagataaagattaattttattaagttttgatttttttttgtggtttgagttttttaggagttgaatataaagggaaatatgaagggtaatttattaaatagtaattgaagagaagagtttatttagtgaaagtagaggagtttgtttgggggtgtgttagggaggtagagaaagttggtttatagggttttgtagatagatttgagtttaagggttatgttatatttttaagttaagttggggttgattttttaaataagaagttgtgtatgatagaaggtttgttttgtgaatattggattttggaggagtattattgtaggaaagattggagaaaggtggtggtgggttgggggtattggtttggaagaagagagtgaagaggtaggagagttggaagagattgggaggttgggaatatagtatttaagggttagggtttttttttttttagttttttgttttttgtagttattatttaaggatgttggtgaaggtgtttttgtgtatttttattttgagagtgtagttttttttttgaggtttatgggagggtttgggtaatgatgaaatgtagtttttatttgtgttattgaaagtagatttgtagagttgtggtttttgttgttatttttttttttgatttttaagaggtaggaaagttttttttgttatgtttttggagttttggagaaaaaaaaaggaagaggtttttttatgggtttttgggatttttttgaataaattttggggggttgggggagattgaataaaatttgtaaattagaggttagtaggtgtattttttaattgttttagttgttataatttgtaaataggttttatataagaatttatatttaaaataattagattatttgttattttgtaattatttattgaggttgaggggggtgatgatatgatataggtttgtgtttttgtttatattttatgttaaattagaatttttagtgttagaggtggggtttggtggtaagtgattggattattaaggtagaattttttattggtgttgtttttatgatagtgagttattgggggattttattgtttaaaagtgtgtagtatt

SEQ ID NO: 257 - DNA, 2501 bp, Artificial Sequence
  chemically treated genomic DNA (Homo sapiens)
ggtgttatatatttttaaataataaggttttttaataatttattattatgagaatagtattaatggggaattttgttttgatggtttagttatttgttattaggttttatttttgatattggggattttaatttgatatgagatatgggtaaggatatagatttatattatattattattttttttagttttagtagatgattataagatggtaaatgatttgattattttaaatgtggatttttgtataaagtttatttgtaagttgtagtaattgaaataattaaaagatatatttattggtttttaatttgtaaattttgtttagttttttttagttttttgaaatttgtttaaggagattttaagggtttatgaaagagtttttttttttttttttttttaaagttttagaaatatgataaggaggatttttttgttttttggagattagaggaggaaatggtagtagaagttgtagttttgtgggtttatttttagtgatataggtaaagattgtattttgttattatttagatttttttgtgggttttaggaaagaggttgtatttttagaatggggatgtataaaaatatttttattagtatttttgggtggtggttgtaaaggataaagagttggaggggagaaaattttggtttttgagtattgtatttttagttttttagttttttttaatttttttgtttttttattttttttttttaagttagtgtttttagtttattattatttttttttagttttttttgtggtggtgtttttttagaatttaatgtttataaagtagattttttgttatgtataattttttgtttaaaaggttaattttaatttaatttaaaggtgtgatatggtttttaggtttaagtttgtttgtaaagttttgtaaattagttttttttgtttttttaatatgtttttgggtaaatttttttgtttttattgagtggatttttttttttagttgttatttggtaaattgttttttatgtttttttttatgtttggtttttaggaagtttaggttatagggaaaagttaaggtttgatagaattaatttttgttttaatgatgattaattgttgagagattataggtttaagattttggtagaaagatagttatagttaatttttttgttaaaatgtttttattttaaatttttatgtagtgtttaatgagtttatgtttagatttatttggtaatttatattattttttttagttttagtttatatagtagattgttggaatgattgagggtgatgtttggtttgtaaataaaaagtgttaaagaaggttaggtatagtggtttatgtttataattttaattatttgggaagttgaggtaggagaattgtttgaatttgggaggtagaggttgtagtgagttgagattatgttattgtattttagtttgggtgatagagtaagatttagttttaaaaaaataggagagagagagagagaaatgtatttatttttttgaaatttgtttataaatatagggttattatgtaatattggtatatatttagattaaaaaaattatttgtttatttgaaatttaaatttaattggtattttgtatttttttttggtaaatttgttaataaatttttatggattttagttatagatttttttttataaatagttttttttttgtttttagaattagataattttaaattaaaattaggtaattttttatttgatttgtgaataaatatgtttatgttataagttgtagaagtagattagatataaataaaaaataaaattagtgaataaatgttgttagtaattgattggaaaaaattgtattaattatttagtgattatgatttttagttagaaaatatatttattgtattttgattttattttgaaatgtaagtaagtttttattggatagttttaaatatatgtgtatttggtttttttttttttagttttttttttagagtattttaaatagttaaagatttagattattttgttttttattgttgtttaaatatggtgttgtatttagatttttgtattttagaaagtttattttatttttttatgttataagtttgttagttttgtatttagttgtttggggggatatggtaagtgttataatagaggttgttttttatattttattttgaattttttttattgtttattattttttttttgttttttaaggattaagttagtttagtttatttaagaatataggtttatgggtatgattataaatttttttttgttttttttatgaaggttagtatgttattttagagtgttttgtttaaatttaaatggggtgataatattttagatttgattgtttaggttgaatttttttttttgggttttttatgtagtgggtatttttaggtagaggttagaaagttttagttttttttttaaggtttgttgaattgtaggagttttgttttagaatgtttttttta

SEQ ID NO: 258 - DNA, 2501 bp, Artificial Sequence
  chemically treated genomic DNA (Homo sapiens)
gtagttattttaggttttgtgtaaatgtgtatttttttttagtttttagtttattaagttttgtttgagttatttgtatttgaaatattatttgttatttttttaggttgggatttgtttagtggaaaatagatgatagttatatgttatttagtgttttattatgtggagaacgtttatataaattattttattttattgttattaagtcggggaaagatttaggaaatttattttaagatgaggatattgaggttagggtaagtgagtgagtttttatttattttttagttgttttttagttgttaaagattaattcgtgggggtggtttaggttcgatttttgtagtatattttttggggttttttaagtgggttcgatttgtttattttagttgtgattgttttttgataggaggagggagtagcgaggttgtatttattgtttataaaaagtagagtttgtttacgtcgagggttcggttgggtgggaggtcgtttttataaggtttttttttgttttatataaagtgtagattgatgttttgagatatagttaggattattatttttagagtttaagttttaatttttaggtatgtgattagatttttttatttatttttataagtggtcgagagtagtttataattattttggtttggttttttaatagtttgagagtaataatttatatagtttgtagaagtgaatgtatttattttaaaagttttgtgttttttgatgttgttgttgtttgggataggattttgttgtcgtttaggttggagtgtagtggtataattttagtttattgtagtatggattttttaggtttaagtaatttttttattttagttttttgagtagttgagattataggtatatgttattacgtttgtttggttaatatttttattttttatagaaataatgtttttttatattgtttaggttggttttgaatttttgggtttaagtgattttttcgttttagttttttaaagtgttgggattataggtataagtttttgtatttagtttaaaaaattttatttttatagtttatgtgtagagtattttggaagttaggtagaaattattttttattttttattatttgggtgatagttgattggtttttgttttttgaaatttattttaaaagtgtatggttttttatgaaaatatttttaattattgatgtgtgaaatgttttgaaatttttggatggaaattttgtattatgaaagaatagaattgttggtggtgtttttgggagaggtttacgagggtcgggtaagtttgtgggggtagtaggtagttatttttatggggataggttgatttggtaggtttattttttatggaagtgggtattgaggaataaaaagtagttttaggttaggtgcggtggtttatgtttgtaatttttgtattttaggagattgaggtagggggatttttttagtttaggagttcgagattagattgggtaatatagtgggatttcgtttttataaaaaatgaaaaaattagtggagtgtggtggtatattttagtggttttagttatttgggacgttgaggtgggaggatcgtttgagtttgggaggtagaggttgtagtgagttaaggttatgttatgagtaatattttgaaggtttatttttgggatttatttaggagttaaacgggttatgtttagttaatttagtatttattaaggtacgtttttagattaaatattatattgtttatagattgatatgttttaaaaatttggtagaggtgggtacggggttaggtagaaattattttttttttttttttttttattaaattttttggtgatagaagtttttttgtaattggggtagaatggggttagatattttggtaatttatttattggtgttatgaaatataaaatattaatgtatttatataaaaagtgatagatgaaattaaaatttgttgttttattaaaattatattagattttaaattattatagagattatattttaatgttttaaatgtatttgatatattataaaattattttagttataagtatattattaaagttattttttattattataaaatgtttttataatgttatttttgataataggaaaatatttatttttattgaaatatgtggagtattattttttggaaattatgttaagtataatggtaatatttaggtttaatttttttatagatttgtttaatatttatttaaattttagtttttattttttttatatgttattagttatatttttatttaaaaaattggaggttgaaggggtaagtaaataaatttttgaagtagataaagtttatttttaattaatagattttagagtttagtttttttaaatttgtttttaacgatagaaattttttttttttttgttttattttgttttttttattaaatggtattgtgttaataaaatttttaagcgatttttttaaattagcgtt

SEQ ID NO: 259 - DNA, 2501 bp, Artificial Sequence
  chemically treated genomic DNA (Homo sapiens)
aacgttgatttaaagaggtcgtttgggaattttattgatatagtattatttaatggggaggataaaatggggtaggggagggagaagtttttgtcgttaaaaatagatttggaaagattggattttaaagtttgttgattaaagatgagttttgtttattttaaaagtttgtttgtttatttttttagtttttaattttttaagtgaaaatatagttaataatatgtgaaaagaatagaagttaaggtttagataaatattgagtagatttataggaagattgaatttgaatattgttattatgtttgatatggtttttaaaaaatggtattttatatattttagtgagggtaagtatttttttgttgttaagaatagtattgtaaaagtattttgtaataataaagaatagttttaatgatatgtttgtaattaaaataattttgtaatgtattaaatatatttaaaatattaaaatataatttttataataatttaaaatttaatatggttttaatagaatagtaaattttaattttatttattattttttatataaatatattaatgttttatattttataatattaatgggtaagttgttagagtgtttgattttattttgttttagttatagaaaagtttttgttattagaaagtttggtggggaaggaagggaggaagatgatttttatttaatttcgtgtttatttttattaggtttttgaggtatattagtttatggataatgtggtgtttggtttggaaacgtattttggtgaatgttgagttggttggatatgattcgtttagtttttggatgaattttagaagtggatttttaaaatgttatttatagtatgattttggtttattgtaatttttgttttttaggtttaagcgatttttttattttagcgttttaagtagttgggattattggagtgtgttattatattttattaatttttttattttttgtagaaacgaggttttattatattgtttagtttggtttcgaatttttgggttgaagggatttttttgttttagttttttaaagtgtaaggattataggtatgggttatcgtatttggtttgaaattgttttttattttttagtgtttatttttatgggaaataagtttgttaggttagtttgtttttatgggagtgattgtttgttatttttataggtttgttcggttttcgtgagttttttttagagatattattaatagttttgtttttttatggtataagatttttatttaaggattttaaagtattttatatattaataattagaagtatttttatagaggattatatatttttaaaatggattttaaagaataaaaattagttaattattatttaggtaatagaaaatgggaaatggtttttatttgatttttaaaatgttttgtatatagattgtgaaaataggattttttaagttgggtgtagaggtttatatttataattttaatattttgggaggttgagacgagaggattatttgagtttaggagtttaaaattagtttgggtaatatagggagatattgtttttataaaaaataaaaatgttagttaggtaggcgtggtaatatgtgtttgtagttttagttatttaggaggttgaggtgggaagattgtttgaatttgggaggtttatgttgtagtgagttgagattgtgttattgtattttagtttaggcgatagtaagattttgttttaaataataataatattaaaaaatatagaatttttaaaataagtatatttatttttataagttatgtagattattatttttaagttattaaaagattaagttaaaataattatgggttattttcgattatttgtaggaatggatagagaggtttggttatatgtttggaaattagagtttgagttttgaaaatgataattttgattatattttaaagtattagtttgtattttgtatggagtaagaaaaagttttgtggaagcggttttttatttagtcgagttttcggcgtggataagttttgttttttatgagtagtgggtgtagtttcgttgttttttttttttgttaaaagatagttatagttggggtgagtagatcgggtttatttgggaggttttaaggaatatgttgtaggggtcgggtttgagttatttttacgggttggtttttgataattagagagtagttgagaggtgggtaaaagtttatttatttattttgattttagtgtttttattttaaaatgggttttttgaattttttttcggtttagtggtaatgaaataagataatttatgtaaacgttttttatatagtaaagtattaagtaatatatgattgttatttgttttttattagatagattttaatttggaagagtgatagatggtattttagatataagtgatttaagtaaagtttgataaattgggggttggaaaaaaatgtatatttatataaagtttggagtaattgt

SEQ ID NO: 260 - DNA, 3201 bp, Artificial Sequence
  chemically treated genomic DNA (Homo sapiens)
ttttttttgaaaattgttaataaaaattcgttggttttacggtttagggggtattacggaatttgcggatatgtgatgttttttttggatattcggttttaaaatgttttttttttgtattttttttttttattttttaggttagtcgatatttagggaaaataggaaaggatttacgtgaaatattgggggttgaatttttttcgataataagttttttaaaaaagatttttaaatgaaatttttttgttttttaatttttatttttgttttgggggtatatgtgaaggtttgttatataagtaaattcgtgttttcggtgtttgttgtatagaatattttattatttaggtattatgtcgagtatttaatagtttttttttttgtttttttttttttttttattttgtattttggagttaattatagtgtttgttgtttttttgtttgtgttataagtttttattatttagtttttatttataagtgagaatatttagtatttggatttttgtttttgtattagtttgttaaggataatagtttttagttttatttatgttttataaaagatatgatttagttttttttaatggttgtattaaatgaagttttaaagatataatataaatattaattttttttttattataaaaattttttgttgaatttgattatatttaaattaacgagttttgttttatgaaagattttttggataaatttgatagttgatggaataggagaagttgtttgttatgtttaaagttaataagagattaatatttagaataaatggagatttgtaaattaatagaaagtaggtagtaaagttaaagaaaatagtttaaggtatagttattaaaaggaacgtgattatgttttttgtagggatatgggtggagttggaagtcgttagttttagtaaatttatataggaatagaaaattagcgagatcgtatggttttatttataagtgggagttgaataatgagaatatatggttatatggcggcgattaatatatattggtgtttgttgagcggggtgttggggagggagagtattaggaagaatagttaagggatattgggtttaatatttgggtgatgggatgatttgtatagtaaattattatggcgtatatatttatgtaataaatttgtatattttttatatgtattttagaattttaaataaaagttggacggttaggcgtggtggtttacgtttgtaattttagtatttttgggaagtcgaggcgtgtagattatttaaggttaggagttcgagattagttcggttaatatggtgaaatttcgtttttattaaaaatataaaaattagttagatgtggtacgttatttataattttatttattcgggaggttgaagtagaattgtttgaattcgagagcggaggttgtagtgagtcgtcgagatcgcgttattgtattttagtttgggttatagcgtgagattacgttataaaataaaataaaataatataaaataaaataaaataaaataaaataaaataaaataaaataaaataaaataaaaaaataaaataaaataaaataaaataaaataaagtaatttttttttttttaagcggtttttattttttttttttgttttgtgaagcgggtgtgtaagtttcgggatcgtagcggttttagggaattttttttcgcgatgtttcggcgcgttagttcgttgcgtatatttcgttgcggttttttttttgttgtttgtttattttttaggtttcgttgggatttgggaaagagggaaaggttttttcggttagttgcgcggcgatttcggggattttagggcgtttttttgcggtcgacgttcggggtgtagcggtcgtcggggttggggtcggcgggagttcgcgggattttttagaagagcggtcggcgtcgtgatttagtattggggcggagcggggcgggattatttttataaggttcggaggtcgcgaggtttcgttggagtttcgtcgtcgtagttttcgttattagtgagtacgcgcggttcgcgttttcggggatggggtttagagtttttagtatggggttaattcgtagtattaggttcgggttttcggtaggtttttcgtttatttcgagattcgggacgggggtttaggggatttaggacgtttttagtgtcgttagcggtttttagggggttcggagcgtttcggggagggatgggatttcgggggcggggagggggggtagattgcgtttatcgcgttttggtattttttttcgggttttagtaaatttttttttgttcgttgtagtgtcgttttatatcgtggtttattttttagttcgaggtaggagtatgtgtttggtagggaagggaggtaggggttggggttgtagtttatagtttttcgtttattcggagagattcgaatttttttattttttcgtcgtgtggtttttatttcgggttttttttttgtttttcgtttttttcgttatgtttgtttttcgttttagtgttgtgtgaaattttcggaggaatttgtttttttgttttttttttgtatttttgattttttttcgggttgttgcgaggcggagtcggttcggtttttatatttcgtattttttttttttcgtaggtcgttgcgcggttttgcgtatgttgttggtagattagggttagagttggaaggaggaggtggtgatcgtggagacgtggtaggagggtttatttaaagttttttgcgtaagtgattatgttcgggtagggagggggtgttgggttttagggggttgtgattaggatcgggggacgtttaagtttagtgtttttttttgagttatgttttttttaatagttatacgggtagttttttaagttttaggacggagattttattttgtattagtttaatattattttgcgttatttgggtcgtatttttggtgagttttgaatttttaagtttaggtaggtatgggtaagtttttgttttcggagtttttttgtttaaattagttgtttcgtagttttttggagtggaggaaattgagatttattgaggttacgtagtttgtttaaggttaagtttgggtgtttgtaatttttgttttgtgttaggttgttttttaggtgttaggtgagttttgagtatttgttgtgtggtagttttttatttttttacgtat

SEQ ID NO: 261 - DNA, 3201 bp, Artificial Sequence
  chemically treated genomic DNA (Homo sapiens)
gtgcgtggaaggatgagagattgttatatagtaggtgtttagagtttatttgatatttgggaggtagtttggtatagggtaaggattgtaggtatttaggtttgattttgggtaaattacgtaattttagtgggttttagttttttttattttagagggttgcggggtagttgatttaaataaaagggtttcgggggtagaggtttgtttatgtttgtttggatttggaggtttaagatttattaagggtgcggtttaggtgacgtaggatggtattggattggtatagggtgaggttttcgttttggaatttggggagttgttcgtatagttgttgggggaggtatggtttagggaggggtattgagtttgggcgtttttcgattttagttatagttttttaaggtttagtattttttttttgttcgggtatggttatttacgtaggaggttttgagtgagtttttttgttacgtttttacggttattattttttttttttagttttggttttgatttgttagtagtatgcgtagggtcgcgtagcggtttgcggggagggagaagtacgagatgtggggatcgggtcgatttcgtttcgtagtaattcggggaggggttaggagtgtagggagggaatagggaaataggttttttcgaagattttatataatattggggcggggagtaggtatggcgggagaggcggggaataggaaggaggttcggggtaaaagttatacgacggagggataagggggttcggattttttcgggtgggcgaggggttgtgggttgtagttttagtttttgttttttttttttgttagatatatgtttttatttcgaattgggaaatagattacggtgtagggcggtattgtagcgaataaagaaaagtttgttggagttcgggggaggatgttaaggcgcggtgagcgtagtttgtttttttttttcgttttcggggttttattttttttcgaggcgtttcgggttttttgaaagtcgttaacggtattggggacgttttgggttttttaggttttcgtttcgggtttcgaggtgggcgaggagtttgtcgggagttcgggtttgatgttgcgggttggttttatgttgggagttttgagttttattttcggggacgcgggtcgcgcgtatttattggtggcgaagattgcggcggcgaaattttagcgaagtttcgcggttttcgagttttataagggtggtttcgtttcgtttcgttttagtgttgagttacggcgtcggtcgtttttttggagggtttcgcggattttcgtcggttttagtttcggcggtcgttgtatttcgggcgtcggtcgtagaggggcgttttggagttttcggagtcgtcgcgtagttggtcggggaagttttttttttttttttaggttttagcggggtttagggagtaaatagatagtaggaagaggatcgtagcgaagtgtgcgtagcgaattggcgcgtcgggatatcgcggggggaaattttttaagatcgttgcgatttcggagtttgtatattcgttttatagggtaggggagaggggtggaggtcgtttagaggaaaggaaattgttttattttattttattttattttattttatttttttattttattttattttattttattttattttattttattttattttattttgtgttattttattttattttatgacgtagttttacgttgtggtttaggttggagtgtagtggcgcgatttcggcggtttattgtaattttcgttttcgggtttaagtaattttgttttagtttttcgagtaggtggaattataggtggcgtgttatatttggttgatttttgtatttttagtagagacggggttttattatgttggtcgggttggtttcgaatttttgattttaggtgatttgtacgtttcggttttttaagagtgttgggattataggcgtgagttattacgtttggtcgtttaatttttatttgaagttttggggtatatgtagaggatgtgtaggtttgttatataggtgtgtgcgttatgatggtttgttgtatagattattttattatttaggtattaagtttagtattttttagttattttttttggtattttttttttttagtatttcgtttaataggtattagtgtgtgttgatcgtcgttatgtgattatgtgtttttattgtttagtttttatttataagtgagattatgcggtttcgttggttttttgtttttgtgtgagtttgttgaggttaacggtttttagttttatttatgtttttgtaaaggatatgattacgttttttttagtggttgtgttttaggttattttttttggttttgttgtttattttttgttgatttgtagatttttatttattttagatattgattttttgttggttttagatatgatagatagttttttttattttattaattgttaagtttgtttaaggagttttttatgaaataaaattcgttaatttaagtgtaattaaatttagtaagggatttttgtggtggggaagaggttggtgtttatgttgtatttttaaaattttatttaatgtagttattaaaaagaattagattatgttttttgtgggatatggatggagttagaggttattatttttagtaaattaatgtaggaatagaaatttaaatattggatgtttttatttgtaagtgggagttaaatgatgagaatttataatataaataaggaaataatagatattgtggttgattttagggtgtaggatgggaggaaggagaggagtagaaaagagaattattgggtattcggtataatatttgggtgatgaaatattttgtataataaatatcgaagatacgagtttatttatgtaataaatttttatatgtatttttaaaatagaaataaaagttaaaaaataaagaaattttatttaaaagttttttttaagagatttattatcgggggaaatttagtttttaatattttacgtgggtttttttttattttttttaagtgtcggttggtttgagaaataaagggaaagagtataaaagagagatattttaaagtcgggtgtttaggggagatattatatgttcgtaggtttcgtgatgttttttgagtcgtaaaattagcgagtttttattagtaatttttaaagagga

SEQ ID NO: 262 - DNA, 2501 bp, Artificial Sequence
  chemically treated genomic DNA (Homo sapiens)
  unsure (1099, 1139, 1661, 1781): unknown base
tttttatatttcgttagttgcgttttcgtggatagttatgagtttagaggaaaggggtatttggttttaggttcgtgttttcgggtggtttttatttgttttttttttttttattggttttttttttcgtttagttttttttttaggaaatgttttgattttttttagttttttttttatttttttttgttcgtttattttttttttagaatagttttttattttttttttttttttagttgattttttttatttttttgattttttttatttttttatcgcggtttttcgttataggggtttttattttgaattttttttttttattatttatggtaggaatttagtataggttttttatttagggttttttattttcggtttttgtgttgggagaaatttttaggcgtggatagtttagtttgaggtattttagtgttggggtatcgtcgtttaatttggtttttagttttgtttttatttttcggaaaaattgatattgatataggggttttttttttgtttttttagttggtattttagtggggaggtttttttattaagaatgagtttttgaaatttagggttagagataaggataatttaggggaagacggggttttcggtggagttaggggtaaattttaatgggattagtgggggatattttagagtttatggtttgattgtatagtttgtttggaggatgggtgcgtagttttgttttttttgaggtttaggattatgttagaagcgatggggtatcgtgtaggggagttaaggttagtagtttgggggtaggagttttttagagttttagaagattgggttttttggagtatagggttttcggttttttttttaagattttttttttagttggaaggtcgatgattgggtggtcgggagggagatttagtttttttttttgtttcgtttgtagtattggttttgtttttttaataaatttttagttatgaaatatatttgattttttgttgatttgtttttgggattggggagggaggtaggtttaagtttttgtatttgtgtgagggtggttttttttggtttttttatttagcgggcgtagtttatnttaggtttttgtgtaggggtagaagagagtagcggggttnggggtttttggttattgttttattgttgtttggttcgagtatagaaaatggaagcggttttggaagagtttgtgtataaggtaggaaatatataaacgaagaggagggagttaaagagatcgcgttttagtttagtttagtttgggttcgggatggggggtcgtcggggcgtatgtaataaatatggttcggggtcgtagggaagggaagggagggtatcgcgggagtgggagatttggtggtaggtttttcgtttttcgattttagaatttttcgtttttggtgattgaggaaggaagggttggttttggggttagtgttatttgtgtaaaatgaggaattttatattattagtttcggggtgggtgggagcgggggtgcggggggtttttcggtcggtttagttttttttttattttttaattttgttcgacgtttcgattttagcggggagatttatagtgagaatgggtgtggtcgtaagggtcggaggtagggttaggagtgtttcgatagtgatantttttttttttttaagagtagcgcggagtcgggggagggggtcgacgaattataggaagaggcgggaggggtttggggttttttttggttaaagttgatattaaaaatataaattttttnttattttattttattttcgtttcggggttttttttcgattttcgagttaaggtacgaagtagtgaggttaggtgaggtcgtcgagaggtggagtcgttattgtggcgacgttgcggttgtttcgggtatagtgggttttgcgcgtcgttttcgtcgttttttggggtgcgggttagggtcgcgtagtagcgatagagcgggttggcgaggggcgttttaggtgggagagaaacggtcgatggttcggtcgtcgggttcggtcgttaggtgagcgttttggtttagtatttcggtcgttttgtcggggttgaggtttagttcggtcgtgaatttggttagcgggtagaggttttttagcgttattttggggtcgtgtaggaagtgcgtggtttgcgttagtagttcggtcgcggtcgttttgttttgttgttttaggtttagttgttcggtcgtgaggcgagttatagtaaagacgttttcggggaagtcgagtttgtttttgtcgtcggggtcggggacgtcggggagtttttttaagttcgttagcgtttcggtcgcgtcggtcgcgttttttacggcgtgtatttttatgtggttgatgaggttgcgttgttgtgcgaatttgtcgtcgtatatttggtattcgtagggtttttcgttcgagtggatgcgtatgtgtttcgtgaggcggtattggcgcgtgaatcgtatgtcgtacgt

SEQ ID NO: 263 - DNA, 2501 bp, Artificial Sequence
  chemically treated genomic DNA (Homo sapiens)
  unsure (721, 841, 1363, 1403): unknown base
gcgtgcggtatgcggtttacgcgttagtatcgttttacggagtatatgcgtatttattcgggcgagaagttttacgagtgttaggtgtgcggcggtaagttcgtatagtaacgtaattttattagttatatgaagatgtacgtcgtggggggcgcggtcggcgcggtcggggcgttggcgggtttgggggggtttttcggcgttttcggtttcgacggtaagggtaagttcgattttttcgagggcgtttttgttgtggttcgttttacggtcgagtagttgagtttgaagtagtaggataaggcggtcgcggtcgagttgttggcgtagattacgtattttttgtacgattttaaggtggcgttggagagtttttattcgttggttaagtttacggtcgagttgggttttagtttcgataaggcggtcgaggtgttgagttagggcgtttatttggcggtcgggttcgacggtcggattatcgatcgttttttttttatttagagcgtttttcgttagttcgttttgtcgttgttgcgcggttttggttcgtattttagggagcggcgggggcggcgcgtagggtttattgtgttcgggataatcgtagcgtcgttatagtggcggttttatttttcggcggttttatttggttttattgtttcgtgttttagttcgggggtcgggggagaatttcgggacgggggtgggatggggtaangggaaatttatatttttgatattagttttgattaaaggagattttaggtttttttcgtttttttttgtggttcgtcggttttttttttcggtttcgcgttgtttttagagggggaggggntgttattgtcggggtatttttagttttattttcggtttttgcgattatatttatttttattgtgaattttttcgttggggtcggagcgtcgggtagagttggggagtggggaggggattgagtcggtcggagggtttttcgtattttcgtttttatttatttcgggattgataatgtgaagttttttattttgtataagtggtattagttttagggttaatttttttttttttagttattaagggcggggagttttggagtcggaaggcgaagagtttattattaggttttttattttcgcggtgttttttttttttttttttgcggtttcggattatatttattgtatgcgtttcggcggttttttatttcgagtttaggttgggttgggttggaacgcggtttttttagttttttttttttcgtttgtatattttttattttgtatataggtttttttagagtcgtttttattttttatattcgaattaaatagtaataaagtagtaattaaggattttngatttcgttgtttttttttgtttttgtataaggatttggnatgggttgcgttcgttgggtggaggagttagaaagggttatttttatataggtgtagaggtttggatttgtttttttttttagttttagaaatagattagtaagaggttaggtatgttttataattaaaaatttattaaggaaataaaattagtgttgtaaacgggatagaaaggagagttgggtttttttttcgattatttagttatcggttttttagttggggagagaattttaaaggagaggtcggggattttgtattttaaagagtttagttttttgagattttaggggatttttatttttaaattattggttttggtttttttatacggtattttatcgtttttggtatagttttgggttttagggagggtagagttgcgtatttattttttaggtaggttgtgtagttaggttatgggttttggggtattttttattggttttattaagatttgtttttggttttatcgaaaatttcgtttttttttaagttgtttttgtttttggttttgggttttaggaatttatttttggtaaggaagtttttttattgaggtattagttaaaggggtaaggaaagggtttttgtgttagtgttagttttttcggggagtgagggtaaagttagaaattaggttaggcgacggtgttttagtattggaatgttttaggttgggttgtttacgtttggaagttttttttagtataggagtcgagggtggaaggttttgggtgggagatttgtattaggtttttgttatgggtagtagagagggaaagtttagagtgagaatttttatgacgaggaatcgcggtgaagaaatgaaggggattagggaggtgaaaaggattaattagaaggggaagaagggtgaggggttattttggagggagggtaggcgggtaaggaggggtgaagggggagttgaggggagttaggatattttttgaagaggaagttagacggaaagaaaggttagtgaggagagagggagtaggtggaggttattcgagagtacgggtttgagattagatgttttttttttttagatttatgattgtttacggggacgtaattggcgaagtgtgaggg

SEQ ID NO: 264 - DNA, 3025 bp, Artificial Sequence
  chemically treated genomic DNA (Homo sapiens)
tttttacgatttgatttttatagtcgttttatttatgggttttttataaattaggggtatagaggagtattgaaagttagtttagaggtgagcgcgcgtagttagcgtttttcgcggatatagtagtcgggtgttggagaggtttggaaagggcgtgtcggagagttaagtgttagtcgtttagggtttgtcggtcgttttttttttttttgttcggtaggggatttagcgcgtacgttagtgtggaggggcgggttggttggttagtttcgggtttttcggttatttcggggattttttttaagtttcgttttcgagtgtttttattggtttcggatttttttttttttagttgttcgtttgggtttcggggcgtttaggttattacggataaatagtttagggcgtttggtcgagaagttaggggtgaggaagttttggggcgttgtcgtcgttttttttaattataaattaggtcggataggagagggaggggtgggggatagtgggtggggatttagattgttagtattttgttatttatagtcggggttttcgagcggtagaaagtttcggttattttttgtcgtttgggttgggcgaaagttaggatcgtgtcgcgttatcgttaggatatggagttattgtcgttatcgtttcgcgacgtagatttgacggttttcgacggttttttttgtttttttgttataacggacgatttttatgacgattcgtgtttcgatttttcggatttgcgttttttcgaagatttggattcgcgtttgatgtacgtgggcgcgtttttgaaattcgaagagtattcgtattttttcgcggcggtgtattcggtttcgggcgtacgtgaggacgagtatgtgcgcgcgtttagcgggtattattaggcgggtcgttgtttattgtgggtttgtaaggcgtgtaagcgtaagattattaacgtcgatcgtcgtaaggtcgttattatgcgcgagcggcgtcgtttgagtaaagtaaatgaggtttttgagatatttaagcgttgtacgtcgagtaatttaaattagcggttgtttaaggtggagattttgcgtaacgttattcgttatatcgagggtttgtaggttttgttgcgcgattaggacgtcgcgttttttggcgtcgtagtcgttttttatgcgtcgggttcgttgttttcgggtcgcggcggcgagtattatagcggcgatttcgacgcgtttagttcgcgttttaattgtttcgacggtatggtaaggtcgggattttaggaagtgaggaagttagggcggcgttcgggatattagggacgcgttttcgagggcggggagttggttttgcgggaggtttgggttaggatttttttcgagagagaggatttttttgttttgggtagttgttattggggtagtttgttttggaagtgtgcgggtaagcgttcgagttgttttattgggggcgttattagaatattgtagcgcgaacgtgaagatttttttttttatttatttttatttttaaaatgtaaatttgcgttttttggtgattgttcgtttttggtttggttttgtatgttgtagattttattttttatttattcgtaattatttttttaattaggataggtttgggttcggaattagagttttaggttagagttagggagggggcggttataggaattggtgttcgggtttcgagtcgtttcgcgggtttgatttagtcgtttttgttgtttgtagatggattatagcggtttttcgagcggcgttcggcggcggaattgttacgaaggcgtttattataacgaggcgtttagcggtgggtatttcgggtttttttttgttcgtttttttttttttatggagttgttttggtttttatttaggacgtttttatttttatttatatacgtttatgttttgggaagtggtgtaggagatgaaatattaagtaagtagttttttgttttttcgattgtttcggattttaattaaagtttttagtttttaatttgttttaaagtattgggttcgggggtgggaggtttgtcgcggttttatttttgtttattaatcgagtttttttcgcgtagaatttaggttcgggaagagtgcggcggtgtcgagtttagattgtttgtttagtatcgtggagcgtatttttatcgagagttttgcggcgttcgtttttttgttggcggacgtgttttttgagtcgttttcgcgtaggtaagaggttgtcgtttttagcgagggagagagtagcggcgattttatttagttatcggacgtcgtttcgtagtgttttgcgggtgcgaattttaattcgatatattaggtgttttgaggggatggtggtcgtttattcgttcgagggatggtgtttttagggtttttcgcgtttaaaagattgaatttaaatgttttttttttaatagcgttttaaaagcgattttttttgaggtaggagaggcgggagaattgaagttttcgttttcgttttatagggtaaggatatagcgcggttttttttacgtagtatttttttcggagatttattgcgatggtcgtttcgtgtttttcggtgggttagagttgaattttgaggggttaggtttagttttttcgcgtttttttttatgggggtgagattttcgtagatttaattttgtttcgggatgtatcggttatttgggggggcgtgagatttagtgtatttcggttttaaatgtagtaggtgtaatcgtaatttatttttaattcgtttttcggtttaggattattttttgtaatatttttgtaatttatttttgtaaataagagttgttttgttagagtaggagtttttggggttgtatttatttttgaggtatggtgtgtggtgttatagggaatttgtacgtttatatcgtaggcgggcgagtcgcgggcgttcgtttaggtgattaaaataaaggcgttaatttatatcgtcgtggtttcggttttttttggatatgggtgtgggattt

SEQ ID NO: 265 - DNA, 3025 bp, Artificial Sequence
  chemically treated genomic DNA (Homo sapiens)
ggattttatatttatgtttagggaaagtcggagttacggcggtataaattagcgtttttattttgattatttgagcgagcgttcgcggttcgttcgtttgcggtataaacgtataaattttttgtagtattatatattatgttttagagataaatatagttttaggggtttttgttttggtaaagtaatttttatttataggaatagattataaaagtattataaaaagtggttttgaatcgggaaacgggttgggggtgggttacggttatatttgttatatttgggatcggagtgtattgggttttacgtttttttaaataatcggtgtatttcggggtagggttaggtttgcgagggttttatttttatgggggagggcgcgagaaagttgaatttagttttttaaggtttagttttggtttatcgaggaatacggagcggttatcgtaatgggttttcgagaagggtgttgcgtggaaaaaatcgcgttgtgtttttgttttgtggggcgggggcggaaattttagttttttcgttttttttattttaagagaagtcgtttttaaagcgttgttgggaggggggtatttaagtttaattttttgggcgcgagggattttaggggtattatttttcgggcgggtgggcggttattatttttttagagtatttggtatatcgggttggggttcgtattcgtagggtattgcggggcggcgttcggtgattgggtggggtcgtcgttgttttttttttcgttgggggcggtagttttttgtttgcgcggaggcgatttagaaggtacgttcgttagtaggagggcgggcgtcgtagggttttcggtggagatgcgttttacgatgttggataggtagtttaggttcgatatcgtcgtatttttttcgggtttgggttttgcgcggggagggttcggttagtaagtaggggtggggtcgcgataagttttttattttcgggtttagtattttgagatagattggaaattgaggattttagttagagttcgggataatcgaaaagatagggagttatttgtttagtattttattttttgtattattttttaggatataggcgtgtgtgagtgggggtgggagcgttttagatagaggttaggatagttttatgaaggaggaggagcgagtagggagaggttcggaatatttatcgttgggcgtttcgttgtagtaggcgttttcgtagtagtttcgtcgtcgggcgtcgttcggggggtcgttgtagtttatttgtaaatagtaagggcgattgagttaggttcgcgggacggttcgaggttcgaatattaatttttgtagtcgttttttttttaattttagtttaaggttttagtttcgggtttagatttgttttggttgggggggtaattacgggtgggtaggagatgaggtttgtaatatgtagggttaaattaagggcggatagttattaaggggcgtaaatttatattttggaagtagggataagtagagaaaaagatttttacgttcgcgttgtagtgttttaatagcgtttttaatggggtagttcgaacgtttgttcgtatatttttaaaataggttattttagtgatagttgtttaggataagggggttttttttttcgggaaggattttggtttaaatttttcgtaaggttagtttttcgttttcggaaacgcgtttttgatatttcgagcgtcgttttaatttttttattttttggggtttcggttttattatgtcgtcggagtagttggagcgcgggttggacgcgtcggagtcgtcgttgtagtgttcgtcgtcgcggttcgggggtagcgggttcggcgtatagaaggcggttgcggcgttagggggcgcggcgttttggtcgcgtagtagagtttgtaggttttcgatatagcggatggcgttgcgtaggatttttattttgggtaatcgttggtttggattgttcgacgtgtagcgtttgagtgttttaaaggttttatttattttgtttaggcggcgtcgttcgcgtatggtggcggttttgcggcggtcggcgttggtggttttgcgtttgtacgttttgtaggtttatagtaggtagcggttcgtttggtggtgttcgttgggcgcgcgtatatgttcgtttttacgtgcgttcggggtcgggtgtatcgtcgcggggaagtgcgagtgtttttcgggttttaggagcgcgtttacgtgtattaggcgcgggtttaggttttcgaagaagcgtaggttcggggagtcgaaatacgggtcgttatagaagtcgttcgttgtggtaaaggagtagagagagtcgtcgggggtcgttaggtttacgtcgcggagcggtggcgatagtagttttatattttggcggtggcgcggtacggttttggttttcgtttaatttaagcggtagagagtggtcggaattttttgtcgttcgggagtttcggttgtagatagtaaagtgttggtagtttgaatttttatttattgttttttattttttttttttttgttcggtttgatttgtggttaaggaaagcggcggtagcgttttagggtttttttatttttagtttttcggttaggcgttttgggttatttattcgtagtagtttaaacgtttcggagtttaggcgggtagttgggggagggggagttcgaggttaataggaatattcgggggcggggtttggggggggttttcggggtggtcgaggggttcgagattggttagttagttcgtttttttatattggcgtgcgcgttaggttttttatcgggtagggagggagggagcgatcggtaagttttaggcggttgatatttggtttttcggtacgttttttttaaatttttttaatattcgattgttgtattcgcgggaaacgttggttgcgcgcgtttatttttgagttgatttttaatatttttttgtatttttgatttgtgggggatttatgggtagagcggttgtagaaattaggtcgtgagag

SEQ ID NO: 266 - DNA, 10224 bp, Artificial Sequence
  chemically treated genomic DNA (Homo sapiens)
agtttttatagttttagtatcgttttttttattttatttcgattgcgtttttgttgtttatttttgtttatttattttaattttagtgttttttttagtttttgggttttaggtgatatattagttagtgggatatgggtttttataggtatttttagtttaatttagttttttttttttttttggttttttggttagtatttgtattatattggtttttattggatatttttgtagtttcgggttttttttatagatatattgttggattagttgtttaatttggtttatttgtagagttttttggtttatttgattttaattgaaatttagttttttaagaaggatttggtgttggaataggtaggtattggaaagttagttgtttaggattattgttttattttattagtatttttttgttattttttattttttttttttagattttagaaatttgggagcggttggagcgagaaaatagaggtaagtggtaggtaattgttaagtattagttttagtatgtgtttagttttttagagtaggatttgcggttgtaggcgcgaaggtaaggtttgtggaaatggtagggagggtggaggggatgtaggaggtatggatgtgggtggggtgtttttattttttagggttagttagatttttttgatttttttttaggtgggttgagatttataggttggatgtgttagaggtagtggttttagagcggtttcgttgtgtttattgtagtgtagaggtttttaagcgttgtttacgatgttagaatgagtggtattgttgtaggtgagggtattttagaattttggatttttaagttttatttttatattttttatatgtattgttatttttaatatttatttgtttgtagggagtgttaagttaagtattgggaaaagtatggaaagatttgtgttttggtagtttagggtgatagagttaaatgagggttgtagttgttgagggtcgattatttatgttaagggaatttatttagaatgtatttttgaattttaagattacggtttagtttttgtcggagttttagttttcgtagtggagagtagagcgggcggtaaagttgttgatcgattttttttttttttattttaagtgaaggttcgagattttttgttttatttagtgggtaggttaagtgtgttgttttagtaaatcggattaggagggttagggtcggatgtggggattttttttttttagtatagtaaagttggtttttagaaatacgggtattttcgcgtggtgttttgcggtcgtcgtcgttgtggtcgttcggggtggggtgtgaggaggggacgaaggagggaaggaagggtaaggcggggggggttttgcgagagcgcgtttagtttcgttttcgggttttatagtttttgtatttaggtttttattgcgcggttttttttagttttttttcgtcgtttagtttggattttgggggaggcgttgaagtcggggttcgttttgtggtttcgttcggttcgcgtttgttagcgtttaaagttagcgaagtacgggtttaatcgggttatgtcgggggagtttgagtttattgagttgcgggagttggtattcgttgggcgcgttgggaagggtcgtattcggttggagcgtgttaacgcgttgcgtatcgcgcggggtatcgcgtgtaattttatacggtagttggtttttggtcgtggttatcgtttttagttcgcggggttcgttacgtatacgtggtgcgatttttgtggcgattttatttggggcgtcgtgcgtaaaggtttgtagtgcgcgcgtgagtagtggtttcgcgcgtttacgagagcggaaggggtagttaaggggtagcgtagtcgtcgcgggttaagtcgcggtagagggggtcggcggggatagttttcgaggattaggttcgttattttcgttttatcgttgaagagtgcgcgaaaatggtttattttttgtcgtattttattcgtatttgggttatagatgagtagaggtggttgtttatatgtaaaaatacgttgattttaagttttttatttttaaaatgttttggttttttttgagaaagggtttgtgtttattgttttcggagtttatttttttaggtttgtttttttttaaatatttatgattttttttagaatttttagggtgaagggaaattattatttatgggagggagtttggaaaaatttagaatttttggtgggttttttgtaagtaggagttttgttgagtttttatttagtaaatatttttttttgatttagtgaattagatgttaaaatatgtacgtagttatatatttagtagtttttttgtatttttgggaatcgttagtaagtaaaggttgtttttttttgggtagatattagttggaattattaggggtgtttttatagtttttttcgttagtttggattttatcgtagatttgttgaattaattgttgggagtggattttaggtattagtaaattttaaaaattttttaaattattgtaatatggagtttgggttgagtattattgttttggtttatttaggaatttgtggatggatagtgttttaggtttgtgtgtgtatggagatttttttattcggtataagaggatattataaatttagttggggggagtataaagttgtgatagaatgtaaagaatgaataaggggtcgagcgcggtggtttatgtttgtaattttagtatttcggaaggcggaggcgggtggattatttgaggttaggagtttaagattagtttggttaatatggtgaaattttatgtttattaaaaaataaaaaaaaatgagttaggcgtagtggcgggtgtttgtaattttagttattcgggaggttgaggtgggagaattgtttgaatataggaggcggaggttgtagtgagtcgagatcgtgttattgttttttagttttggcgatagagtgagattttgttttaaaaaaaaaaaaaaaaaaaaaaagaataaggttgggatattgtagcgtttttaaagagaaataaagtagttatggagataagaagtaggatgatttgggtatgtttattagaggtagagataagggagaaattaaagataagtttgggtttttgtttttagtaattgggagtttagtggttatttttgttgtaaagaggaagttgggtaagtgtagtagtgaggttgaagaaaagggaattaaattttggttatgtttatttgaaacgttttttagatattttagtgaaggtattggtacggaggatttagtttgagggtttaggttagtgttttagtcgtggatttggggtagatgaatgtagatagattaggttagtgattaggattgagtttagattttatcgtgagatatggaagttgagttagaatttgtaaaggagttgagtaggagttgtagggggtaggaggaaaattgggagagtgtagtttttgggagttaaagggagtaagttttaaatgatgttgagggggtgagaatggagaatggaatattggattttatttggtagtatatagatcgttgaggattttgtttcgggtagttttttggaggaagaggtaagtttggttggagtgggtagaggggagagtgaaggcgaaggattagagtgtatagagattagtgttttggtttgaggggagtagagataggtgataattatagggtagacgtaggttaaaggtgtttagttttttttttaagtaaatgggtagatgtattttatatacgtttttagtgaagggtcgggtgcggtggtttaagtttgtagttttagtattttggaaggtcgaggcgggtggattatttgagattaggagtttgagattagtttggttaatatggtgaaatttcgtttttattaaaaatataaaaattagttgggtatggtggcgggcgtttgtaattttaggtatttaggaggttgaggtagaagaatcgtttgaatttaggaggcggaggttgcggtgagtcgaaatcgcgttattgtattttagtttgggtgataaaagtaagacgtagttttttgttgttgtttttttaattgttaatgaggaaaggggaagttttgtgttaggcgatagagatttaattgttgagtaggtttttttgtttgtggtttttcggtcggtttttagacgtttaggtggttaatattagagttcgcgtagtagtgtgaggtaatttattgagataggtcgggtttgcggagtttggcgagtagcggttttttttttggggtttttttttaattttcgggatattttttcgatttggagttttttcgttttatcgttaggtttttttgtagattgtaagtttatttgttattatcgttgtcgcgcgttcgtttgtttggattgttgcgggtttcgggatttgggttgggaattcgcggtggagcgggatacgaacgtggtgagcgcggggtcgagggcgtatgggaagggcgaggatgggtaggttatagtgtaggtattttcgagggttgtttgggtgtcgcgcgtaaggagcgttttaattgtcgatttttcggcggtatagagaggttaattttgcgcgggggttgggaggggagtttggattgtcggtttcgtaagtattttattcgttgtaagcggattcgggtttaggttgatttaggtttcgcgtacgcgtatttttcgtattttttcgttttcgttttcggttagaggttatttttgtgcgtttgttcggacgttggtattcgttttcgttttttgtggtaggtggggtttgtgagtggagtttcggagcgatgaggttatttttgggggcgaagcgtgcgtgttttcgtttcggcgtttttgttttaatgagataagagttagatttcggcgatttacgttttagttttaacggttgcggcgcggttttggttcgggcgtacgcgtatattgatacgcgtatacgtacgtacgcgatcggggcggtggttggcggttacggacgcgtaggattgggggacgggcgggtacggttatgggcgaggcggaggcgttttttttcgaaatgatttggagtagtacgacgagtagtggttattgtagttaagaggattcggattcggagttcgagtagtattttatcgcgcgaatttcgttagttcgtaggtcgcgtcgggattaggtgggagttagggggtgtcggcgggcgggaggggaagcggtcgttggagtttcgtttttttcggttcgttgtcgcgttttgggtcggtgggtagttttatttttttggttacgtggtttttcgcgggttttggtcggggatttgttcgcggaatcgtgcgtaagatttcgattttatcgtttagatgttgggtgtcggggtttttttggtttttgttatagataggttgaatacggaaaaagtagttgtatggtttgtggtagatttgagtcgggtattatttagttatgattaaagtcgatcgagtagtttggattagtatttcgattttcgcgttcgaatgtttttgttttttttttggggagattaggggaggatgtggagagggaagagttttcgttaggaattgagaagtatgtttaggaaaatttgagaggtagagagagattttgtttttttatttgtatttttgtatggagttagttgagtttttattttttttttgttttggtttgttattagttgttggaatgtggaagattttgttttttttttttagggtggatttggagaaagatttgggaatagataggaaagaagttttgttttggattataagtatttaggagtattttatttataggaagggggaaagttagattataaaatgtttaaagaggtggaaaaagagatttaggttattaatttaggattgtaaggtgtttcggaattttttaggtatttttattatcggagaattgtgtgttagatgttattggtgtgattattaggtttagagaattaggtttaggtattaggaaaaagaaatagggattgtgaagtttagtatgtttggtagaaatggggcggaaatttttatttaagtaaagaaagtggagttgtgagtgatgttttagataaaattttataaaattttttataaaatgggtggtgtttagtacgttaaaattttagtttagagtttgggtgtaagggttgagttgagtgtagatttttgggtttgtttttatgttagttagttttgagttattttttattgtggaaaggtgggaaaattataagatattaattaattgaaaaggagggttagttacggaggtgtatatttgtaattttagttatttgggagggtgaggtagaaggattatttgaatttgggaggtagaggttgtagtgagttaagatcgtgttattgtattttagtttgagtgatagagtgagattttgttttaaaaatagaaaaggaagttaagtacggtggtttatatttttaatgttaatgttttgggaggttaaggtaggtggattatttgtaattaggaattcgaggttagtttggttaatatggtgaaattttatttttattaaatatataaaaattagtcgggtatggtggtgtgtgattgtagttttagttatttgggagattgaattattttaatcgggaggtaaaggttgtagtgagttaagatcgtgttattgtattttaatttgggtgatagggtgaggttttgttttaaaaaaaagaaagaaggttgggtttggtgatttatgtttgtaattttagtattttgggaggttaaggtaggtagattatttgaggttaagagttcgagatttgttaggttaatatagtaaaatttcgtttgtattgaaaatataaaaaaattatttggttatggtggtgtgtgtttgtaattttagttattggggaggttgaggtaggagtattatttgaatttagaagatagaggttgtagtgagtcgagattgggttattgtattttagtttggatgagagagtaagattttgttttaaaaaaaaaaaaaaaaaaaaagaaagaataggaggttgagaagttttaagttatatgttaaaaaaaaagaaaaaaatattagttttaggttaggtgtagtggtttatatttttaattttagtattttggaaagtcgaggtgggtggattatgaggttaggagtttaagattagtttggttaaaatggtgaaatttcgtttcgattaaaaatataaaaaattagttagttgtggtggtaggtatttgtaattttagttatttgggaggttgaagtagagaattgtttgaatttaggaggtagagattgtaatgagttaagatcgtattattgtattttagtttggaaaatagagcgagattttgttttaaaaaaaaaattattagtttttatggatagtggtagagtggagggtgggtttttatggtgtagaagggaaattttatggttttgttgtgtattcgattgggatggttgttgaaatttttttttagtaggtagttttggaaatagaaaaagaaatttttttttttttagaattttggaagggttgtgtagtgtttttaatttaagtttgttttttgagtgaagatagggaggtttattattagaagggaaggggttggaaatgaggttattgtattttagtttagggtttttgggttatttaggaagggaagaaggagtaagtttttttattgttaggtaggagtttagagttattataagaataagttagtattatttttgtgttttttttgttttgtaaataaaatgatttttttttttgttttggtattagagtttgtttggtattttttttgtttttagtattttttttatttgggtattttttttcgttggtgtattgaataaatatatttattgttttatttatagtttttagtttttattttttagggtttatattatttgtttttattaattcgataaggttgtttattgtttttagtaaggtttgtattggggtttttattttagtgtttttttttatttaggagatttttggatatttggggaagaaaatgagtttaaatttttatttttttttttttattttttttttgtaaggttttggttttagtttttagttttatatttttgttggttgtagaatagtagcgggttttgggtaaggagtattttgttaaaacgttttattttgtttttttatttgttttttttatttgtttttattagatggtttaagtgtttaaggggattttagggcggagttagggagaattttggtttttttgggttaggtataagattattttataggaaattttgtgggaatttttttgggataaagtattggttagcgttgagtttagttgtgtttgtgatattcgtattttaattagggtttatttgacgttaataggaagtaaggttgatgtagtggggttaagggagtttgggagaagaaagtcggtttagagttttggttgttttgttttatattttattttttcggtaagaatttagtttttagatgaggtggggagtgagtggtcgagttaaaaatttttgggtcgggtacgatggtttacgtttgtaattttagtattttgggaggtgaaggtaggcggattatttgaggttaggagtttaagattaatttggttaatgtggtgaaattttatttttattaaaaatataaaaattagtcgggtgttgttgtggtacgcgtttgtagttttagttattcgggagtttgaggtaggagaatcgtttgaatttaggaggtagaatttgtagtgagttaagatttagttattgtattatagtttgggcgatagagtgaggtttcgttttaaaaaaaaaaaaaatttttgggttaaatttttagatagtataggtaggtgtagaaatttattaggaagttgtttgtgtatttttggtagattggagtttggtttaaagttgttttttatgtagtttgggttaaggttaaatattatgttatagtgattttttttattatgtgtgagatatggagaattggttttaagtattattttgtttattggtggttggattattgatgtgtattattttttattttttttattttgtagtgggttatggtttcgtgtcggggtagaggagaaaaatgggttgttttttttaggataaatttttattttaatttaattagggtgttgtgattagaatgtgtaattgaggtgtgattttattgattttttttttttttgagatcgagtttcgtttttgttgtttaggttggagtgcgatggtacgattttagtttattgtaatttttatttttcgagtttgagtaatttttttgttttagttttttaagtagttgggattataggtatgtgttattacgtttggttaattttgtatttttagtagagacggggtttttttatgttggttaggttggttttaaatttttgattttaggtgatttattcgtttcggttttttaaagtgttagaattataggcgtgagttaacgtgtttagtttgtttttgttttttgtgttttgaagtagggttttatttagttttttaggttggagtgtagtgatacgataatagtttattgtagttgtaatttttcgggtttaaacgatttttttattttagttttttgaatagttgggattataggtatattattatatttggttaatttttttttttttttttttagtagagatgaggttttgttatgttgtttaagttggttttaaatttttgaggattaagtgatttttttattttagttttttaaaatgttgggattgtagatgtgagttattatatttagtttgattttattttaaatgagagtttttttttagagttttttagttgtttttggtttttggttatgtgtttttagttgtttttgtttttgtggtatttttaaggttatatttagtgttgaggttttaggtaggtagtagagagaagttaaatgattttgttttttttttatttatttagagtatgtaaaattaggagtagtggtgggtttagggtgggtattagttatgtatatgtatattagggatagggggttaaaggtagttagtttttaaagattgttttagaggttattttttagagaagttttgggttttttaagggttttgtgtttatgttggtttattttgtagg

SEQ ID NO: 267 - DNA, 10224 bp, Artificial Sequence
  chemically treated genomic DNA (Homo sapiens)
tttgtaagatgggttagtatggatatagggtttttgaggaatttagggtttttttgaaaaatggtttttggggtagtttttggaaattgattgtttttggttttttgtttttgatgtatatatatatagttggtgtttattttgaatttattattgtttttggttttgtatgttttgggtggataagggaaagatagaattatttggtttttttttgttgtttgtttagggttttagtattgaatgtagttttaaggatattatagaagtaggggtaattgaaggtatatggttaggggttaggaatagttgagggattttgaagagggatttttatttaaagtaaaattaggttgggtgtggtggtttatatttgtaattttagtattttgggaggttaaggtaggaggattatttgatttttaggagtttgagattagtttgggtaatatagtaagattttatttttattaaaaaaagaaaaaaaaaaattagttaggtgtggtggtgtgtttgtagttttaattgtttaggaggttgaggtgggaggatcgtttgagttcgggagattgtagttatagtaagttattatcgtgttattgtattttagtttggggaattgagtgagattttgttttaaaatataaaaaataaaaataggttgggtacgttggtttacgtttgtaattttagtattttgggaggtcgaggcgggtggattatttgaggttaggagtttgagattagtttgattaatatggagaaatttcgtttttattaaaaatataaaattagttaggcgtggtggtatatgtttgtaattttagttatttaggaggttgaggtaggagaattgtttaaattcgggaggtggaggttgtagtgaattgagatcgtgttatcgtattttagtttgggtaataagagcgaaattcggttttaaaaaaaaaaaaaattagtaaaattatattttaattgtatattttgattatagtattttagttgagttggagtgagggtttgttttggagaaggtagtttattttttttttttgtttcggtacggggttatgatttattgtagggtgagaggagtggagagtggtgtatattagtagtttagttattagtggatagagtagtatttggagttagttttttatgttttatatatagtgagaaaaattattgtgatatgatgtttaattttgatttaagttgtataaaaggtagttttaggttaggttttaatttgttagaggtatataggtagttttttggtgggtttttgtatttgtttgtgttgtttggagatttggtttaaagattttttttttttttgagacgaagttttattttgtcgtttaggttgtagtgtagtggttggattttggtttattgtaagttttgttttttgggtttaagcgatttttttgttttagattttcgagtagttgggattataggcgcgtgttataataatattcggttaatttttgtatttttagtagagatgggattttattatattggttaggttggttttgaatttttgattttaagtgattcgtttgtttttattttttaaagtgttgggattataggcgtgaattatcgtattcgatttagagatttttaattcgattatttattttttattttatttagggattggatttttgtcggaagggtggagtgtgggatagggtagttagggttttgaatcgattttttttttttagatttttttggttttattgtattagttttattttttgttgacgttagataggttttagttagaatgcgagtgttatagatatagttaagtttagcgttgattaatattttgttttagaagaatttttataaggttttttgtagaatgattttgtgtttagtttaggagagttagggttttttttgatttcgttttggagtttttttaagtatttaaattatttgatggggataaatggagaggatagatgagggagtagggtggagcgttttagtagaatgttttttatttagaattcgttgttattttgtagttagtaaggatgtggggttaagaattaaggttagggttttataggaaaaaggtaaagggggaggggtgggaatttaagtttatttttttttttaagtatttaaaggttttttggatggagaagagtattggagtaaaaattttagtataaattttattggggatagtgggtaattttgtcgggttagtaaaaataaatggtgtgggttttggaaaatgagggttggaggttgtgaataaagtagtggatgtgtttgtttagtatattaacgggaagaagtatttagatgggaggagtattaggggtaggagaaatgttagatagattttagtgttagggtaagaaggaagattattttgtttgtagaatagggagggtatagggatggtgttaatttgtttttgtgatggttttgagtttttatttaataatgagaaagtttgtttttttttttttttttggatgatttaggagttttgggttgggatgtagtgattttatttttagtttttttttttttggtgatgaatttttttatttttatttagaaaatagatttggattagaggtattgtatagtttttttaggattttaaaggaggaagagtttttttttttgtttttaaagttgtttgttggaagaggattttaatagttattttagtcggatgtatagtaggattatggaattttttttttgtattatagggatttattttttattttattattgtttataaaaattgatggttttttttttgagatagagtttcgttttgttttttaggttggagtgtagtggtgcgattttggtttattgtaatttttgttttttgggtttaagtaattttttgttttagttttttaagtagttgggattataggtgtttgttattataattggttaattttttgtatttttagtcgagacggggttttattattttggttaggttggttttgaatttttgattttatgatttatttatttcggttttttaaagtgttgggattaaaggtgtgagttattgtatttggtttaaaattgatgtttttttttttttttttaatatataatttgggattttttagttttttattttttttttttttttttttttttttttgagatagagttttgtttttttatttaggttggaatgtagtggtttagtttcgatttattgtaatttttgttttttgggtttaagtgatatttttgttttagtttttttagtagttgggattataggtatatattattatggttagataatttttttgtatttttagtatagacggggttttgttatgttggtttggtaggtttcgaatttttggttttaagtgatttgtttgttttggttttttaaaatgttgagattataggtatgagttattaagtttagtttttttttttttttttgagatagagttttattttgttatttaggttggagtgtagtggtacgattttggtttattgtaatttttgtttttcggttgaagtgatttagttttttaagtagttgggattatagttatatattattatgttcggttaatttttgtatgtttagtagagatagggttttattatgttggttaggttgatttcgaatttttgattgtaaatgatttatttgttttggttttttaaagtattggtattagaggtgtgagttatcgtatttggtttttttttttatttttgagatagagttttattttgttatttaggttggagtgtagtggtacgattttggtttattgtaatttttgttttttaggtttaagtgatttttttgttttatttttttaagtagttgggattataggtgtgtattttcgtggttagtttttttttttaattggttagtgttttgtggtttttttatttttttatagtggaaaatggtttaggattgattgatatgaagataagtttaggggtttatatttaatttaatttttgtatttaagttttgggttaagattttggcgtgttgagtattatttattttgtaaggaattttgtaaaattttatttgaagtattatttataattttattttttttatttaaataaggattttcgttttatttttgttaggtatattgagttttatagtttttgttttttttttttggtgtttaggtttggttttttgagtttggtggttatattaatggtatttggtatatagtttttcgataatggggatatttaggaggtttcgagatattttatagttttgggttagtaatttggatttttttttttatttttttaggtattttataatttagttttttttttttttgtgggtaaagtgtttttgaatgtttatggtttaaaataagattttttttttatttatttttaaatttttttttagatttattttagaggaagggaatagaattttttatattttagtagttggtgataggttagaatagggaagaggtgagggtttagttggttttatataggagtgtagatggaggagtaggatttttttttgttttttaagtttttttaaatatattttttaatttttggcgaggatttttttttttttatatttttttttagtttttttaaggagggagtaggagtattcgaacgcggaaatcgaggtgttagtttaaattgttcggtcggttttagttatagttggataatgttcggtttaggtttattataagttatatagttgtttttttcgtgtttaatttgtttgtgatagaaattaagggggtttcggtatttagtatttaggcggtggaatcggggttttacgtacggtttcgcgggtaggttttcggttaggattcgcggggagttacgtagttaggagggtggggttgtttatcgatttaggacgcggtaacggatcggggagggcggagttttagcgatcgttttttttttcgttcgtcggtattttttggtttttatttggtttcggcgcggtttgcgagttagcgaggttcgcgcggtgaagtattgttcgagtttcgagttcgagtttttttggttgtagtagttattgttcgtcgtgttgttttaggttatttcgaaagaaggcgttttcgtttcgtttatagtcgtattcgttcgttttttagttttgcgcgttcgtagtcgttaattatcgtttcggtcgcgtgcgtgcgtgtacgcgtgttagtgtgcgcgtgcgttcgggttagagtcgcgtcgtaatcgttaagattgaaacgtagatcgtcgggatttagtttttgttttattggggtaggaacgtcggggcggggatacgtacgtttcgtttttaggaatgattttatcgtttcggagttttatttatagattttatttattatagggaacgggggcgggtgttagcgttcgggtaagcgtataagagtggtttttggtcggaggcgagggcgggaaggtgcgggaagtgcgcgtgcgcggagtttgggttagtttgggttcgggttcgtttgtagcgggtggagtatttgcggagtcggtaatttaggttttttttttagttttcgcgtagaattagtttttttgtgtcgtcgggaaatcggtaattagaacgttttttgcgcgcggtatttaggtagttttcgagaatgtttgtattgtggtttgtttattttcgttttttttatacgttttcggtttcgcgtttattacgttcgtgtttcgttttatcgcgggtttttagtttaggtttcggggttcgtaatagtttaggtagacgagcgcgcggtagcggtagtggtaggtgaatttgtaatttgtagagaggtttggcggtgaggcggaggagttttaggtcggggaaatgtttcggagattgaagggaagttttagggagagggtcgttgttcgttaggtttcgtaggttcgatttattttagtgggttattttatattgttacgcggattttaatgttggttatttgggcgtttggaaatcggtcggaaggttataggtagagaggtttgtttaatagttggatttttatcgtttagtatagaattttttttttttttattggtaattaaaaaaataataataaaaaattgcgttttgtttttgttatttaggttggagtgtaatggcgcgatttcggtttatcgtaattttcgttttttgggtttaagcgatttttttgttttagttttttgagtatttaggattataggcgttcgttattatgtttagttaatttttgtatttttagtagagacggggttttattatgttagttaggttggttttaaatttttgattttaggtgatttattcgtttcggttttttaaagtgttgggattataggtttgagttatcgtattcggttttttattgggaacgtatatggaatatatttgtttatttatttgaaggaaaaattaaatatttttaatttacgtttgttttgtggttgttatttgtttttattttttttagattaagatattggtttttatatattttaatttttcgtttttatttttttttttatttattttagttaggtttgtttttttttttaggaaattgttcgggatagggtttttagcgatttgtgtattattaaatggaatttagtgttttattttttatttttatttttttagtattatttgaagtttgttttttttgatttttaggggttatatttttttagttttttttttattttttgtagtttttgtttagtttttttgtagattttgatttaatttttatattttacgatgaagtttgggtttagttttgattattggtttggtttgtttatatttatttgttttagatttacggttgaaatattgatttaaatttttagattagatttttcgtgttagtatttttattaggatgtttaaaagacgttttaagtgaatatggttaaaatttaatttttttttttttagttttattgttatatttgtttagttttttttttgtagtaaaaatggttattaggtttttagttattggagataaaagtttaaatttatttttgattttttttttgtttttatttttgataaatatgtttaaattattttgttttttatttttatggttattttatttttttttgagaacgttgtaatgttttagttttgttttttttttttttttttttttttttgagatagagttttattttgtcgttaaggttggagggtagtggtacgatttcggtttattgtaattttcgttttttgtgtttaagtaatttttttattttagtttttcgagtagttgggattataggtattcgttattacgtttggtttatttttttttattttttagtagatatgaggttttattatgttggttaggttggttttgaatttttgattttaggtgatttattcgttttcgtttttcgaagtgttgggattataggtatgagttatcgcgttcggttttttgtttattttttgtattttgttataattttgtgttttttttagttgaatttgtgatgtttttttgtatcggatgagagggtttttatgtatatatagatttgggatattatttatttataagtttttaaataggttagagtagtgatgtttaatttagattttatgttataataatttggggagtttttaaaatttattgatgtttagggtttatttttagtagttgatttaataggtttgcggtgggatttaggttagcggggaggattgtaaaagtatttttggtgattttagttggtgtttatttaggggagagtaatttttgtttgttggcgatttttaggggtgtagaaggattgttgggtgtgtggttgcgtgtatattttagtatttgatttattgggttagaaaagggtgtttgttaaataaagatttaataaaatttttgtttgtagggggtttattaaaggttttaaatttttttaggtttttttttataggtggtaatttttttttattttaaaggttttggagggggttatgagtgtttgagaagaggtaagtttgggaagatggatttcgaggatagtaggtataaatttttttttaagaagggttaaggtattttaaagataagaaatttaaaattagcgtatttttatatataagtagttatttttgtttatttgtggtttagatacgagtggagtgcgataagggataaattattttcgcgtattttttagcgatggggcgaaagtaacggatttagttttcgggagttgttttcgtcgattttttttgtcgcgatttgattcgcggcgattgcgttgttttttggttgtttttttcgttttcgtaggcgcgcggggttattatttacgcgcgtattgtaggtttttgcgtacgacgttttagatgaagtcgttatagaggtcgtattacgtgtgcgtggcgggtttcgcgggttggaagcggtggttacggttagggattagttgtcgtgtggggttgtacgcggtgtttcgcgcgatgcgtagcgcgttggtacgttttagtcgggtgcggttttttttagcgcgtttagcgggtgttagttttcgtagtttaatgagtttaggttttttcgatatggttcggttgggttcgtgtttcgttggttttgggcgttagtaagcgcgggtcgggcggggttatagggcgggtttcgattttagcgttttttttaggatttagattgggcggcgggaaggagttgaggagagtcgcgtaatggaaatttgggtgtagggattgtggggttcgaaggcggggttgggcgcgttttcgtagagtttttttcgttttgtttttttttttttttttcgttttttttttatattttatttcggacggttataacgacggcgatcgtaaagtattacgcggagatattcgtgtttttggaggttagttttattgtgttagaggaagagggtttttatattcggttttggtttttttggttcggtttgttgaagtaatatatttggtttatttattgggtggggtaggaagtttcgagtttttatttggggtgaggaggagggagatcggttagtagttttatcgttcgttttgttttttattgcggagattggggtttcggtagaggttggatcgtgattttgaggtttaggggtgtattttgggtggatttttttggtatgggtggtcggtttttagtaattgtagtttttatttggttttgttattttgggttgttaggatataagtttttttatgttttttttagtgtttgatttggtattttttgtaggtaggtgggtattgaggatggtaatgtatgtgggggatgtgggagtagggtttagaggtttaaggttttaggatatttttatttgtagtaatattatttattttggtatcgtgagtagcgtttagaagtttttgtattgtagtaagtatagcggggtcgttttggagttattgtttttagtatatttagtttgtaggttttagtttatttgggggaaagttaggaaggtttgattggttttggaaggtgggggtattttatttatatttatgttttttgtattttttttattttttttgttatttttataggttttattttcgcgtttgtagtcgtaggttttgttttgaggggttgaatatatgttggagttggtgtttggtaattgtttgttatttgtttttgttttttcgttttagtcgtttttagatttttgggatttaggagagagaagtggagagtggtaggaaggtgttggtaaagtgggatagtggttttgagtagttaattttttagtgtttatttgttttaatattaggttttttttaggaggttgggttttagttagggttagatgggttaggaaattttgtaagtgggttaggttgggtagttggtttagtagtgtgtttgtgaggaaggttcgaagttgtaagggtgtttagtggaggttagtgtgatgtaggtgttggttagggggttaaggaaaaggaaggggttgggttgggttgagaatgtttgtgggggtttatgttttattagttggtgtgttatttgaggtttaaggattgaaaagagtattggggttgaggtgggtgggtaaagataaatagtagggacgtagtcggggtaggatggggagggcggtattggggttgtgggggtt

SEQ ID NO: 268 - DNA, 2501 bp, Artificial Sequence
  chemically treated genomic DNA (Homo sapiens)
aatgtgtgcgtttatattaaataattgattgtttgtaaattaaaagtagaattttttttaaaagtttgtattgtgttattaaaaaataatttataaaattaaagtgattttaaatatattttattatttaaaataagattgtaggtaagtagggtggtttttttaaaagtcgttttatgtatttgattaagtaatttttgatgatttttttataatagttttttatatttggttagtttgtatgagtaagatgatttgtgatagaatattgtgaatattgttttaaaatatataaaaatgtttgttttttatttttttttattgatgtggtttaaaagtttgatttaaataacgtgtgcgtgtaataagtttacgggtcggaaaggtaaagtggacgttttttttgttttattatttgtagtatttattttaagggtaaaatgataatagttattattagtaaggatgaataaagtaagaatgagtatttttttttttttgtttgtatagattttaattttttttttttttttcgttttagttatattaggttattataattacgcgatatttatgggaaggaggagggaaagtagggagattagggggggaaatatgtcgtatgaaaaaattaagtggatttatgttagtttttgtattttttttttaagaatttttaaattatttttgaatagttgtgtttaagataaaatatgttgatttagttagtggagatataaaattaatgatttttgtgatgtttttagaggggtagtatttgtatgtatttattggtttagttataagtgatatattgtttttcgagtaaatatttgcgtttttttattgtttagaataagaaattttttttttgtagataatgttaaaggtgatttttttgaaagttcgtagaatattagaatttgaatgatttatggttttatattattcgatttaggaggtatatttttgttttttattgtgtttgtgtttgttttttagtagtagatttataaatattgtttatatttattttatatatagatgataggtagagtgtgtattagggaaatttggtagtgttattgagtttttatatatatatatattgtttttttgttattttgagtttggatatggaaattggagtgttgttgtgtttagtttttattttaaaattttgcgtgggaaaattaatgtgtaatttaagaaaaatagaaaaaatgtattttttatttaagaaaaataagtatagatgaatgaaaatatttatacggaatttggaattttttaaaatatttaatattttggaatgttttaaaatatttaatttaaaatatttaaagttagatgtgttttagttatgtatttattgtagtaaatttatattagttttttaagatgagagattgttgttttttgaaagacgtgatgttgtatcgttttttttcgtgttttttagaaaaaagtatgatatttttattatttttttttttatttgataagatttgtttttttttatattttttttgttttatatgaggtataatttttggagtttgtaattgttaggagatgaagcgatgatggggagtgattatagttaatagttttgattaataataaggtagaaaattagtaatgttagtatttagttattttgtttttttttttttttatatgtttttttagttcgtgttggcggttttatagagggtagtcggagtttttcgttagttttgaagtgtagtaaaggtgtaggtagggtagagaattagggaaattaaggagaaaaagtagaaattgtaaaaattatgatgttgagattttcgtagggtttagtgtgtcgtaggaggggtaaggatgaagcgtgttgtgtgttgtttttgtgtgtttttttgttatatgtggatttatttgtgtttggatatgttgtgatcgaaatggtaattattgttattattgtgattttattagtagttttggtgttgttttcgatagattttgaagatgtagagagggggaacgattacgggacgttaatttttatttttgataacgatgataattcgttgggttatataggtagagtgttttttttttaaatattaatttttttttgaaatgtttttatttttattaattattaattatttgtataaaattaatcgaattatttttgtttttagttaataattataattttttattttttaaattttattttgtttatattagattatattgttaaagtaaatatttttaagaatagaaatgtatatggaaattgtaattatttttattgttttattatgtttaatataaaagaatgtttattaatttgaaattttgatattgttagtatttttagaatgatatttttttagaaatttaatatttgattaagtttttattataaaggaaaaaaatattatttgtaagtaatttggatttaaatttatttgtatttttttttttttatatttgtagttttaaaaata

SEQ ID NO: 269 - DNA, 2501 bp, Artificial Sequence
  chemically treated genomic DNA (Homo sapiens)
tgtttttaagattataagtgtaaaaaaaaaaaagtatagataaatttgaatttaaattatttgtaggtagtgttttttttttttatgataaaaatttagttaaatattaaatttttaagaaaatattattttaaaaatattagtagtattaaagttttagattgataagtatttttttgtattaaatatagtaaaataataagaatgattatagtttttatgtatatttttgtttttaaaagtgtttattttagtaatatgatttgatatgaatagaatgaagtttgaaaaatgagaaattgtggttgttagttggaagtagggatgattcgattaattttatataggtggttgatggttgatggaggtggaggtattttaggaggaagttagtatttgggaaagagatattttatttgtatagtttagcgaattgttatcgttattagaggtggggattggcgtttcgtggtcgttttttttttttatatttttagggtttgtcggaaataatattagagttgttgatggggttatagtagtaatagtagttgttatttcgattatagtatgtttagatataagtaaatttatatgtgatagaaaaatatataaggataatatatagtacgttttatttttgttttttttgcggtatattaagttttgcgaaggttttagtattatggtttttatagtttttattttttttttttaatttttttaattttttgttttgtttgtatttttgttatattttaaagttggcgaagggtttcgattgttttttgtgaggtcgttagtacggattgagagagtatatggaggagggagagggtagggtggttgaatgttagtattgttaattttttattttattgttaattaaagttattgattgtgattattttttattatcgttttattttttggtaattatagattttagagattgtattttatatgaggtagggaggatgtggggaaaaataggttttgttaaataagagggaggatgataaaaatgttatatttttttttgagaaatacggaagaaaacggtgtaatattacgttttttagaaggtaataattttttattttaaaggattgatataaatttattgtaatgaatgtatgattgaaatatatttaattttggatattttgggttggatattttaaaatattttaaagtattggatattttaaaagattttaaatttcgtataagtatttttatttatttatgtttattttttttaaataaaaaatgtattttttttgttttttttaaattgtatattaatttttttacgtagaattttagagtggaggttaagtataataatattttagtttttatatttagatttagagtagtagaggagtagtatgtgtgtatatagaagtttaatgatattattaaatttttttggtgtatattttatttgttatttatatgtaagataagtatgagtagtgtttataggtttgttattgagaagtagatatagatataataaaaaataagagtgtattttttaaatcgaataatgtagagttataggttatttaagttttgatgttttgcgggtttttaagagaattatttttaatattatttatagaggaaggattttttgttttgagtagtgaagaagcgtagatgtttattcggggaatagtgtgttatttatggttgagttagtgagtatatgtaggtattgtttttttagaaatattatagaggttattaattttgtgtttttattagttaggttaatatattttgttttagatatagttatttagggatgatttggaaatttttaaaaaaggaatataaagattaatatgagtttatttggtttttttatgcggtatatttttttttttaatttttttgttttttttttttttttttataagtgtcgcgtaattataataatttgatgtggttaaaacgaaaaaaaaaaaaaaagttaagatttgtgtagataaaagagaaaagatatttatttttgttttatttatttttgttagtgatggttgttgttattttatttttaaaatagatgttgtaagtgataaggtagaaaaagcgtttattttattttttcggttcgtgaatttattatacgtatacgttgtttaggttaaatttttaagttatattagtgagaaagaatggggagtaggtatttttgtgtgttttgaggtagtgtttataatgttttgttataagttattttgtttatgtaaattaattaaatataagaggttgttgtaggaagattattagaaattgtttggttaaatgtatgaaacggtttttaagaaaattattttgtttatttataattttgttttaaatgatagaatgtgtttagaattattttaattttatgaattattttttagtaatataatgtagatttttaagggaagttttatttttaatttataagtaattagttatttaatgtggacgtatatatt

SEQ ID NO: 270 - DNA, 3501 bp, Artificial Sequence
  chemically treated genomic DNA (Homo sapiens)
ggtttatttttgtaattttagtattttgggaggtcgaggtaggcggattatttgaggttaggagattgagattagtttggttaatatggtgaaatttcgtttttattaaaaatataagaaaattagttaggttggtggtatgtatttgtaatcgtagttatttgggaggtttaggtaggagaattgtttgaattcgggaggtggaggttgtagtgagtcgagatcgtgttattgaattttagtttgggcgatagagcgagaatttgttttaaaaaaaaaaaaaaagttaatatttgttgagtttgttttatgggttattttatagtaattataaaaggaaggtattgttttttagtttttttgtttataaatgaggatataaaggtaagtaagattaagagttttggttaaggtaggttgggagttaaatttaggttgtttgagtttaaaatcgtaaatttttttttttttttgggtggggggatcgagtttcgttttgtcgtttaggttggagtgtagtggcgtgatttcggtttattgtaagtttcgttttttgggtttatgttatttttttattttagtttttcgagtagttggtattataggtgttcgttattattttcggttaattttttgtatttttagtagagacggggttttattgtgatagttaggatggtttcgattttttgatttcgtgatacgttcgtttcggttttttagagtgttgggattataggcgtgagttatcgcgttcggttaaaatcgttatttttatttttgtgttagtttttagtttaagttttttatgatataagagggaaattgaggtttagggaggtataacggtttttttaaggtcgtatagttagttagggatataatttaagtttttcggcgataggtttagggttgtttggatttcggagtgtggtgggggtattttggcggtttttttttagttaattttcgcggtcggttcggtttaggtttagtcgggtgagttgatgatttaacgggtaagtattgtattttgcgattttggttcgtttcgttgttttagagggtttttagttttcgggtcggacgggcggtaatttgtttgagtgaaatcgggaaagtttcgtttttcggcgtttagcgggcggcgggggcgttttttagttagttagcgagtcgtggtgttcgttaggtttggcgggcggcgggaaattcgtcgcgcgcgtttcgtcgtttatttttttattggttagttaggttttcggggcggtattttggggtagtttttttttgtgattgggcggtattggtttcgggtttcgtttttagtttagggttgcgaaggcgggacggagtaaggcggttgtaggtttcggcgtgttgttggttgtagagagtttaggtagcgggttcggtaggtatagtttttagcggttttttttatttagttcgtttttttttttttttagttcgtttttttttgtttttattttcgaattttgtgggacgtgatttttttttaagatttaggtttttttggcggcgttatattttttttttagatcgtattttttttcgttgagatttgagtttttgatgaaattgtgattcgtttgtaaatcgggtgtttagtgtcgtttattattgcggcgttgtttttagattttacgtcggagattttattattttttgtttcgttttattagagttcgttagtttttcgcgtcgtggtttttatttatttttttttagttcggtagaggagttacggcgttttttgtgggtttattcgattttttcggtttcgtttagtttgattggggtcgtcgtgatggagagagtcggatttcggttttatttggatttaaagttttgcgtgcgggttattgagttatttagggagtttagggttttaatttagaggtttaaagttagggtttttaagttagattttagttttatttttagtttatcgttaagaattggaagagagataggaggagtgttataggggaattttattgagaggaaatatggttatatttagtagatatgtttttttttaatttcggttttgtattggcgcgcgcgtatatatatatatatatatatatatatatatatatttatttttagtttttgttattgtttagtttttagttataaggcgggatattttttaatttttacgattagaggtagtaggggtaggagggaggtaagaggaggggagaagtagtttggttttggggtcgggaggaagcgggtgcggagagtaggggtgggggtatgattagtggttaggtgcgtttaatagttgtaagaagagtgggatttttagttttaggtggttttagttttgttagtttttttttacggagttttttggagtaagaatagcgtttaggggagaagggtggggttttttattttatattagttttttcggtagggtgggggattggagggggtagggcggggcggtggcgggtaatatttagttttggggtttttggggagtttcgtttttttttttttcggcgttgtcggtcgtttatagtgttaggttgtttcgtagtagttgtatgatgagggtgttgtttttgtaggagttttcgttgagggtgtgtagattagttatggtttcgtcgaaagtggttttggttagagagatggttttttcggggttgttggcgatttcgtagtggaagacggaaaagtttagggttaggtttaggcggatggggttggtgggcggtattttttttttgttgatgtttatggttttttggtaggttgatcgggttgagttaatgatgcgttttttgtcgttatcggtggttatttcggttaggtagcggtagtagttattttttatttttaggtagaagattcggttttcggcgttttcggtttttttgatgaggtggttgtttagtaggtttagtacggtgtcgtatacgttttggagtttagtttttattttttttcggtatttacgtatttcgggttttttttttttcgagtttttttcgttgtttttttgtttaatattggatagtattttttaggtagttttttggtcgtttattacgtttttataggttattgagagtaggtttcgtttttcgtaggagagtttttcgtttttttttacggcgttttttatgaaggttgttatgtttttatagcgttcggtttgttttgttagtttggttttttggattagattggttttttttatggttttggggatatataggcgggcggcgggttaattgttgtttgggattaatgtcggattttgtgttttttttgtttttggtttgttttttggttgggtggttaggtttagagaagggtggggaggagtagggggcgggattagggtttaagatttgtttttttttttttttttttttatatttttttcggttttgtagtaaaggtaaaaaggttgggatgtgggggtgaattattagaatagttagtaggagaaat

SEQ ID NO: 271 - DNA, 3501 bp, Artificial Sequence
  chemically treated genomic DNA (Homo sapiens)
attttttttgttgattgttttgatgatttatttttatattttagtttttttatttttattgtagagtcggaaagggtgtggggaagagaggagagggaggtaggttttgggttttggtttcgttttttgtttttttttatttttttttgggtttggttatttagttaaaaggtaggttaagagtaggagagatatagagttcggtattggttttaggtagtagttagttcgtcgttcgtttgtgtgtttttagagttatggagagagttagtttgatttagaaggttaagttggtagagtaggtcgaacgttatgaggatatggtagtttttatgaaaggcgtcgtggagaagggcgaggagtttttttgcgaagagcgaaatttgtttttagtagtttataagaacgtggtgggcggttagagggttgtttggagggtgttgtttagtattgagtagaaaagtaacgaggagggttcggaggagaaggggttcgaggtgcgtgagtatcgggagaaggtggagattgagttttagggcgtgtgcgatatcgtgttgggtttgttggatagttattttattaaggaggtcggggacgtcgagagtcgggttttttatttgaagatgaagggtgattattatcgttatttggtcgaggtggttatcggtgacgataagaagcgtattattgatttagttcggttagtttattaggaggttatggatattagtaagaaggagatgtcgtttattaattttattcgtttgggtttggttttgaattttttcgttttttattacgagatcgttaatagtttcgaggaggttatttttttggttaagattattttcgacgaggttatggttgatttgtatatttttagcgaggatttttataaagatagtatttttattatgtagttgttgcgagataatttgatattgtggacggtcgataacgtcggggaagaggggggcgaggttttttaggagttttagagttgagtgttgttcgttatcgtttcgttttgttttttttagttttttattttgtcgagaggattagtatggggtgggaggttttattttttttttttaggcgttgtttttgttttaaagggtttcgtggagagggattggtagagttgaggttatttggggttggggattttattttttttgtagttgttgagcgtatttaattattggttatgtttttatttttgtttttcgtattcgttttttttcgattttaggattaggttattttttttttttttttgttttttttttgtttttgttgtttttgatcgtaggaattgaggagtgtttcgttttgtggttgagaattggatagtggtaggggttggagatgggtgtgtgtgtgtgtgtgtgtgtgtgtgtgtgtgtgcgcgcgcgttagtgtaagatcgagattgagggaaagtatgtttgttgggtgtgattatgtttttttttaataaagtttttttgtgatattttttttgttttttttttagtttttggcgatgggttgggagtgggattggaatttgatttagagattttgattttggatttttgagttagggttttgaattttttaggtggtttagtggttcgtacgtaagattttgagtttaggtgaggtcggggttcggttttttttattacggcggttttagttaaattggacgggatcgggagggtcgggtgaatttataggaggcgtcgtggtttttttgtcgggttgaggggaggtgagtgggagttacggcgcgggaggttgacgagttttggtggagcggggtaggaaatagtgaagttttcggcgtgagatttaaggatagcgtcgtagtagtgagcggtattgagtattcgatttgtaggcgggttatagttttattaagggtttagattttagcggaggggagtacgatttgaggaaggggtatagcgtcgttaaaaaagtttagattttaggagagggttacgttttatagagttcggagatggagataaaaggaaacgggttgaaggggaggaaggacgagttgggtgggaagggtcgttgggagttgtgtttatcgagttcgttgtttgagttttttgtagttagtaatacgtcggaatttgtagtcgttttgtttcgtttcgttttcgtagttttggattggaggcggggttcgaggttaatatcgtttaattataggagggagttgttttagggtatcgtttcgggggtttgattggttaatgggaaagtgagcggcggaacgcgcgcggcgagtttttcgtcgttcgttaggtttggcggatattacgattcgttgattgattgagaggcgttttcgtcgttcgttgagcgtcgaggggcggagttttttcggttttatttagataagttgtcgttcgttcggttcgagagttgggaattttttagagtagcgggacgagttaggatcgtaaaatgtagtgtttgttcgttgagttattagtttattcggttgggtttgggtcgggtcggtcgcgggggttggttggaaaaaggtcgttaagatgtttttattatatttcgaaatttaagtagttttggatttgtcgtcgagaggtttggattgtgtttttggttggttgtgcgattttggaaaagtcgttatatttttttgggttttagttttttttttgtattataaggggtttggattaaaggttaatataagagtgaaaatggcggttttggtcgggcgcggtggtttacgtttgtaattttagtattttgggaggtcgaggcgggcgtattacgaggttaggagatcgaggttattttggttattataatgaaatttcgtttttattaaaaatataaaaaattagtcgggagtgatggcgggtatttgtagtattagttattcgggaggttgaggtaggagaatggtatgagtttaggaggcggagtttgtagtgagtcgagattacgttattgtattttagtttgggcgatagagcgagattcggtttttttatttaagaaaaagagaaaatttgcgattttggatttagatagtttgggtttgatttttagtttgttttggttaaggtttttaattttgtttatttttgtgtttttatttataaataggggaattgaaaaatagtattttttttttatagttgttgtaaagtaatttataggatagatttaataaatgttagttttttttttttttttaagatagattttcgttttgtcgtttaggttggagtttagtggtacgatttcggtttattgtaatttttatttttcgggtttaagtaatttttttgtttgagttttttaagtagttgcgattataggtgtatgttattagtttggttagtttttttatatttttagtagagacggggttttattatattaattaggttggttttaattttttgattttaggtgattcgtttgtttcggttttttaaagtgttgggattataggagtgagtt

SEQ ID NO: 272 - DNA, 2501 bp, Artificial Sequence
  chemically treated genomic DNA (Homo sapiens)
agatattgggaagagtttttgaaatttagaggaacgtatgcgtatgggtagtttggggtaggtagaagatgttaaggtgtttagagataaaggggttagtatgtgtaagggtatttggtatgagtagatagtggtgggatcgtgggtatgtgaggagaggagaggttgtatggggttaagtgttaggttaggaggagagtttaggtgttttgttaaaaatgatagttagttgggtatggtggtatgtatttgtagtttcggttatttaggaggttgaggttggaggattgtttgagtttaggggtttgaggttgtagtgaattatgattatattattgtatattagttagagtaatagatgagatttcgttttaaaaaaagtgagagtttgtttttatgattagtttggattttttaggtttttggagttagaggtagggaggataaggtaggaggtgtgttgtagataagatgtaattagagataagtttggtggggtagtgaggttggaaagtggttgtttggtgatttttaaggataggatttagggtttttttggtatttgtttattgttttgtaaattttttttttttaaggttagaaaggattgtttgtaaagtgtatttaggaagtagttttagatttttgtttttttaaatagtttttggaaagattttaagttttttggagagagatatttatatttttttttgtaggtaaaaattgtattaagaaggtgggttcggtggtttatatttgtaattttagtattttgggcggttgaggtggatggattattggaggttaggtgtttgagattagtttgggtaacgtggtaaaatttcgtttttattaaaaatgcgaaaattaatcgggtggggtggtaagtatttgtaattttagttatttgattggttgagttataagaattgtttgaatttgggaggtagaggttgcggtgagttgagattatgttattgtattttagtttgggtgatagagtgagttttcgttttaaaaaaaaaaaaagaaaaaagtggtcgggtgtattggtttacgtttgtaattttagtattttagtattttgggaggtggaggcgggtggattatttgaggttcgaagttttagattagtttggttgatatggtgaaattttgtttttattaaaaatataaaaattagttaggtgtggtggtaggggtttgtaattttagttattcgggaggttgaggtataagaatagtttgaatttgggaggtggaggttgtagtgagttgaggttacgttattgtattttagtttgggtgatatagcgagattttattttaaaaaaaaagttttaaatgttttttttaaatgaatgaataagtaataattttttaaaaaaatcgtattaagaaaagaggtagttattatatataatttattttttgaaaatttgttttggtggttggtatgttttttgagtaaagtgtaatttatgatttttttttttacgggatggggtggggtagagggagtttttaagtttgttaagagttagtattagaaggagttttcgagtaatttggtgatttgtgtttttttgttttatgtttagataatgttttaatgtgtttttttttgtaaatttttttaattttgtatttttttttagtggaaaatgtggaaggtaggggagttatgaagattagtgtgtttttaaatggtttggatagagttgtttattagtttgcgttttttggtatatgttttttttaattttcggatttgggttataggttgttatttataatggtaaggttagattttttagggagtattggaggagtattatttggtgaatgaggagggatattttatggcgatattaggaaggatgggggaagtatttggggtgttagagattttagggatatggagttggaggttgggtggtttttgaagtatagttgagttttgtatatgttagtaggttagaagtaggaaaatatataagtttaagttggtttttcgtatattgtgtataaaaagattagatttaggatgatttggtgggattgttaggggttgatcggagtgttgttgggaaggagttttagtttcgttttaggttttttattaggtaggattgggatttttttagggtttggaggagtaagtttttgtaggtttagttttaggttggtgtgaaattgaagagttttcgtattttgtttgggttggtgggttcggttcgtattgtttggtattgtttattcgttaggattttttcgtatagagtatttagtagttatttaacgtttgtgattttcgcgataagcgtagttcggtgttggtttataaagtgtaggtttgggggtgggaggagaatatgagttagtagttagggtgtggggtttgtttttgttgaatttgagttttttaggaatttttttgtaagtttaggggtagggttttagggggcggttattaggattttatatgtagtgggatgagg

SEQ ID NO: 273 - DNA, 2501 bp, Artificial Sequence
  chemically treated genomic DNA (Homo sapiens)
ttttattttattgtatgtggggttttggtggtcgttttttggagttttgtttttaggtttgtagaggaatttttgaagaatttaagtttagtagggataggttttatattttggttgttggtttatgttttttttttatttttaggtttgtattttatagattagtatcgggttgcgtttatcgcgagggttataaacgttgagtggttgttggatgttttgtacgggaaggttttgacggatgagtagtattaggtagtgcgggtcgagtttattaatttaagtaagatgcggaagttttttagttttatattagtttggaattggatttgtaaggatttgtttttttaggttttaagggagttttagttttatttggtggaggatttggagcggagttgaggtttttttttagtaatatttcggttagtttttggtaattttattaaattattttgaatttgatttttttatatataatatacgaaaagttagtttgaatttgtgtgtttttttgtttttagtttgttggtatgtgtagagtttagttatgttttagaggttatttagtttttagttttatgtttttagggtttttggtattttaaatgttttttttattttttttggtatcgttatggaatatttttttttatttattaggtggtgtttttttagtgttttttaaagggtttaattttattattatagataatagtttgtgatttaggttcgaaggttaaaagaggtatgtattaaagggcgtaaattggtgggtagttttgtttaagttatttagaaatatattagtttttatagtttttttattttttatattttttattggagaaaaatgtagaattagagaaatttgtagggggagatatattagagtattatttaaatataggatagaagagtataagttattaaattgttcgagggttttttttggtgttggtttttaataggtttaaaggttttttttgttttattttatttcgtgggggaaagggttataggttgtattttgtttaaaaaatatgttaattattaaagtagatttttaggaaatgagttgtgtgtggtagttgtttttttttttgatgcgatttttttggagggttattatttatttatttatttgaaaggaatatttaaaattttttttttgagatggaatttcgttgtgttatttagattggagtgtagtggcgtgattttagtttattgtaatttttattttttaggtttaagttatttttgtgttttagtttttcgaatagttgggattataggtttttgttattatatttggttagtttttgtgtttttagtagaaataaagttttattatgttagttaggttggtttggaatttcggattttaagtggtttattcgtttttattttttaaagtgttggggtgttggaattataggcgtgagttaatgtattcggttatttttttttttttttttttttgagacggaggtttattttgttatttaggttggagtgtagtagtatgattttagtttatcgtaatttttgttttttaggtttaagtaatttttgtggtttagttagttaagtaattggaattataggtgtttgttattttattcggttaattttcgtatttttagtagaaacgggattttgttacgttgtttaggttggttttaaatatttgatttttagtgatttatttattttagtcgtttaaagtgttgggattataggtgtgagttatcgggtttatttttttgatgtaatttttgtttataaagggaaatatgagtatttttttttaggaaatttgaggtttttttagaggttgtttgggaaagtaggaatttagggttattttttaagtatattttataagtaattttttttggttttgaagagggaggatttgtaaagtaatgggtagatattaaggagattttgaattttatttttaggaattattaaataattattttttaattttattgttttattaggtttatttttaattatattttatttgtaatatattttttattttgttttttttgtttttagttttaagagtttgagaaatttaaattgattatgggaatagatttttattttttttgagacgggattttatttgttgttttggttggtgtgtagtggtgtgattatggtttattgtagttttaaatttttgggtttaagtaattttttagttttagttttttgaatagtcgggattataggtgtatattattatgtttagttgattgttatttttaataggatatttaaattttttttttaatttggtatttaattttatgtaattttttttttttttatatatttacgattttattattatttgtttatattaggtgtttttgtatatgttgatttttttatttttggatattttgatattttttatttgttttagattgtttatacgtatgcgtttttttgggttttagaggttttttttagtgttt

SEQ ID NO: 274 - DNA, 11913 bp, Artificial Sequence
  chemically treated genomic DNA (Homo sapiens)
taaagtagggtgttattaaagaaagaaggaagaaattggttaaacgaatttagaatataaataaaattattgtataaataaaatttttgtttacgattaagttggaatggcggttaaaaaagaaaagggaaaaaaaatttttagatgtaggtagatttttataattaagttattttttaaaggggaagtaaatgtgatagaatatttagtaagtaaatttattgaggaatattttgtttttatataattaaatttaatattgaggtaaaattgataattattaaattgagggtagttgggagagggaaaggggatgagataaaatttagtttataaaatattttattattttttataggttaaaaaatataaaagaaatatttggaaagaattgtttaagacggaaagattttaagattgtgtgattttttttttttttttttttttttttttttttttataggtgtagaataattttttttttttttttcgtggttttttttttttttattttttttttttgttgtttgtaaagttgaatttggggttaggagttttaattgtaattttagattggaattttagatggtgcgtttaggattggaagtaatttttagtttattaattttatgggtttacgtatttgttttggttacggtttggtttttatttttattgtggtattaatgtagaataaattgagatatattttttatataattagttttagaatttaaaaagatttacggtataataatagaggtagtgtcgcggaatttttttattgaggattttcggggagttcggggattatttcgcggtggtattagaatagacgagtaattttagcggttttaggtattgcgaattgggggagagggggaaattttgtatcgtattcggtagtatttaacggtttcgggtttttagatagggttagcgaggagagttaggatagtaagtggggattggttaaaaaaaatcgatttaattttgaaatgattagaagaagttgggagtagttattataaagttttttttttgtttttttttttttttaattgaaggaatgacgttgaaatttttatcgttagcgcggggttgggaattattttaaatatttgttttgtagtttcgagtgggtagatttcgaagagttggagtcggcggggaggggaggaatagttgttgggttgttttgcgcgtggggttcggggcgcgggtttcggggagaggcgttagtcgaaagtttgtttttttttcgcgataggtagtagcgaggtcgagttattttttattacggtttgcgggtttcgcgcgtagtgtggttgttttcgtttttgatcgatcgtagcgttttggggtgtttatttagttgttcgcggtcgttgggtgattttcggagggcggtttaggcgtgcgtattggtttttggggttgcggttgtagtagtttagtttcgcgttttgttagatgtagtggatagcgtcggggtgaaagtaagggttgagaaatttttattgttttgtttttatttagtttcgatttttttatattgtaataattatgtattttcgaggtcgggatgtttgcgttttgttagtgtattaacgttatatggttttttaggggttgttttcgtttttgtattttattagttttgaagaggtagaggggtggtgggtaaaatttttaattggacgttgagagattcgggttttagttcggcgttgttattaatttgttttttgtttttaaatagtagtagtaataaaaattgtaaagttgattgagttaaaggtttatattgtttttttatttaatttttagaataattttatgaggtgggcgttagtattttattatttcgtttgattagtaaggaaattgaggtttagagagattgcggaattcgtttagggttatatagttgttggttatttggtagagttgaggttttattttggggttattaattttttgttttttatcgttgcgttttatagattgtttttttttcggttgtttgggttttagtttttttttttgtaaaacgagaagtttaatttgtagttttttttgttaatcggtggtttagattaggaatttttgttatagatttcggcgttgataggggtaagaaggtgggtgaaagaagggggcgtttagttttttatagtttgtttttttttgggatttcgcgaagggcgggtttcgcgagttaaaggaggtataggagagcgtttatcgttcgcggcgggtgaaggtgttatttgttttcgtgttaggttgtgagttttggtgtttagtttagggcgttaaggttagtgtagttggtatgttttttttggaaaattttaggtttttcgtagagaacgttatttataataaagaagaggatagagaggtatggagcgttttgcgattgtaggagtacgttagttttttagcgttggtttagtgtcgtttgggttttcgggtatgtggattcgttggggtcgtacggagattttttgtcgggtttttggggtttttcgattgcggttttttagtttagtattttttttttggtttcgtaggttgtagggaattttttttatttttttagtcggagaagtttaagtcgggcgagggggtatttcggggttcgtatcggtgtttttttttttttcgtttttataaggattttgagaaaataaatggtagaggagagaggagttttatatttgtttggtttttttttttttttatttatttttatattttttatttcggggtaaaaatttatttttgaaaaatgttggtagagatttacgtgtttttgttttatttgggttttataaatataacgatttatatttaagttagtttttttttagataatttttttttttttcgttaaaagtgttaaggatggtaaaagaagaaataattttaattttttcgtttggaaatgaaagttttcggttttttataaagggtttttcgttttttatagttgagttttagttaagaaaaacgatttttaagtagaaataataggcggggagaaggaagggagatatagggatttggggggtttttagggtaattggtagtgaattttgtttcgagagttttttttttatttaaaaaattaaacgcgcgagtttcgcgaaaggtttagggatagatcgtgtgggagaggattgagtagagagcgtgggggtagtgttttgtagaatttttttttttttaataataattttaaaagtttttgagtggagacgacgtaaagttaagtagtaaaggtggtttgggaggtaagcggagggtttaagtgtcgtatttttatttttagggttttttgcgtttacgggatgcgtatttttaagaagtgcgtttttcgagtaagttttgggttcgtatatatttcgggttcgtagttagaatttaatggcgataacgtttatgtaatgtaagttaaaaattaaagcgtaaaaaattattatgttatttattgaaacgttattttttgttaaattgtaattattttgttttatataagtttggttggaaagtttgtagttttagttcgggttagttaggtataggaggtcggattgtaatcggttgtttttttttcgtcgcgtttggtcgttttacgttgcgtcgtcgttgttgttttttggcgtttttgggattttatacgtatttttgaaatacgtttcgtttcggttttcggtttttttttttgtttaggggttgttttttaatagatattgatttttttagaagatttaaaaattaaattaaaatattttttattcgttttaaatatttgttttggggcgcgggggttgttaaatagagattagacgaagggagttagatttagcgaagtttttcgagtttttaaagattcgaatattaattcgcgttcgtgggtcgatggaggttttttttattttattttttggtttttttaattggttttcgttttttggttaattattgagtaattagaatggtattttcgattagggttataggtagtgttcggcggagtggttttaggagttattcgttttttgtcgggtttcgtatttaaatttttttttttattttttttttttaaattgggcgttaggatgtttcggtcggaatatacgtaggttttgggcgtttgtttaagggttttttttttttttaaattagtcgttgttttttcggtttaatcgtagaagaattagatattttttattggaaagggaaattaagtgttgttgattttaattttaggtaggcggtaatcgtttttcgtttggcgtaaattttattaagtaaataattattagtcgatcgaaatacgttcggtttataattggtgtaattttcggttatttaattgagggacgttcgtttttagtttcgatttttggaatttataaagggttatttttttttttagtgattttaagattatggttatttttttattcgatagttttagaagtaagagttagatttaagggtgtaaagtaagggtatacgtttttttgaagtttgattgagttttttttgcgtttttttgaagttttcgtttttttggagtttatttgtttttttttttaaattatttttttagattaataattttatttttatttttatcgtattcgattttgttcggatttattgtttatttgaacggattttttagtgagacgaggtttttatattggcgaaggttaagaaggggaggtggggggagggttgtgttatatcggttagttgagagcgcgtgttgggttgaagaggagggtgttttcgagagggacgttttttcggattcgtttttattttagttgcgagggcgtttttaaggagtagcgcgcgttgtttggtcgggtttgggttgttgagtgaatggagcggtcgagttttttggttttttttttttttcgcgtcgtcggttttttttatttgagttttgggaagttgagggtagttaggtagttggggtaaggagtttaaggtagcgtttatattcgggggtttttcgtaattcgatcgtttgttcgtttttttatttttcgtttttttttttatttatttatttatttatttatttatttagagtcgggacggtagtttaggcgttcgggtttcgtcgttttttcgtcgcgattttggatttttttttgttgtaggattcggtttttacgtgtgtttcggagtcggcgttttagtatacgtttcgtttcgggtttgggtgtttatagtagttagagtagtagggagttcgggattcgggcggtatttgggttaagttaggcgtcgtcgaggttagcgttgaacgtttttagggtcggaggagtcgcggggcgttcgggtttgagtcgtagtaaatgggtttcgacgtgcgggatttgaacgcgttgttgttcgtcgttttttttttgggtggcggcggcggttgtgttttgtttgtgagcggcgcggcgtagtgggcgtcggtgttggattttgcgttttcgggcgtttcggtttacgggtcgttgggcggtttcgcgtcgttatcggtttcgtcgttattttcgtcgtcgtcgttttatttttttattaaataggagtcgagttggggcggcgcggagtcgtacgaggagtagtgtttgagcgtttttattgtttattttttcggttagtttattggtatagtcggagtttgtcgttacgggtttttcggttttttttcgtttagttaggcgttattcggttaggttaggatgttttttaacgcgttttatttgtttagttgtttcgagagttagttcgttattcgtaattagggtaagtaggtcggggagcgttttttacgcgcggggtagtggcgttagggatttttcgttttaggatattttttttttttattttttttgatcgtagtttttatttagttgttttttaagggtcgtgaggatagcggaagcggcggttggggaggaggtcggagagtgggagtgtacgtaggtattggttttcgatattttttaaagttaggtagagttaggagtttgattgttcgtaagagtcgggagggcgtttggggttttttagagttcgagagatttcgggattgttagtttttacgggagtggaattaggagatcggcgtagtgtttggttttgttttggggagagttttgttaattaaggaaacgttaaattgttattaagcgtagcgttttttagacgtttggattttggattcggagtgggattagcgcgggggtgagcgtttgtgttgtgttgttttcgtagcgttaaaatgtttaggagtatttttagtttttataatacggtgttggtatatatttaggtgtatattaagtatcgtagagaattagaatgagtatatgtatttttagtaattaaatggttttttggaatagcgtcgtgttcgtggatagttttcgcgtatggtaatatagaagtggatttttattgggtttcgtttaggcggcggttacgtaggttttggggatggaagagaatttgatttattcgagtttaagttatgcgggattaggttttatcgtaggtagtggaaggaggtacgagttttggttttttttttagcgtatttggggcgtttttttattttgtaaacgcggggtttagttgggatagtatttttttaagatttggggttagaataaggatagggttattcgttgtgtttagttaggatataaggagggaattcggtatacgataagtattaggttggttttttatttcgcgtcgatgttcgtttatttttttttcgtttgggcggcgcggattcgaatttgcggagtttttgtagtttgttttttttatttatttttagtggatttttacgttattgagaatttaagttagttcggtttgattcggtaatttagtaaacgttttattaatataatggcggatgttttttttggagtaaaattattcgagggtttagggatcgggatgtttttggaatgcgtgggaagtagagtgtattttttgtaggaggtattttcgtttaaggttcgggagaagggttttgtttttgttgttcgtttttattcgcgttttttaaacgcgcgtttttaggtcgtttttattttagtttaattaggagtattcggttttcgcgaagttttggagaaatcgaaatcgttttttttttcgggagaatttgggattattgttttgtggaggaatcgtaagtagatttaagggttgtttttattttatgtttttagttagtgaaattagtgttttgtatttaaggggcgttgggataatttattggtcgttgaggtttgtgttttttgattagatcgcgttatttttgtttagtaggttggtgttatttttggggagtttttaggttttagtgttttcgtttataagaggatagttgagatgggtaatttggagattgggttcggtttgaagttatattttatagatgtagaagcgttatttattatttttttggggttttaaatatggaattcggtaatttatttaaatatttgtgattgagaaataatgaattcgagagtattgtttgtatgtgtgttatttggaggcggttgagaaattatcgaatttatgtttttggggtataaaatattattacgttattatttttttagtatttttaggggatttttgaaatttgggttttgtcgtttcgtttgggttttttgtttagttttttttagggtaggtttggtgtttgggattttattatatgtcgtggggggtgggattgtgggttttgtagttagtaggtattatatttttggaaaatatttggatttttttgtaatatataggcgtggttgttatggagaaaaagttaaaaggggattaggattagtaggtgaatgtattttttttttttattttggagaaaaagtttaatggagagagggttttagatttaagttatatagtttggaagtattatttttaggtttaagttttgttttgtagtgaaaatagatgggtttattttatttagtttttgaggtttattgggtagtttggatgtgagaagcgtttcggttgttattttggagtgggtaagggtggttttcgagattttgggtttattttttggatttttagggtttttgttgtttttttaggaatgtagggtttggtttaagatttgggttgtgagaggtaagggtattaatttttaaaaatgtggaaatggttattagagcgttaaggttaaattttaggggagaggaattaaggtcgtttttggatttttagggtagtttagttatggtgtataggtaggggtaattgttggtatttatttataatcgtttaaaattttataagtatgtttatattttaaatttttaaatattatattttgtattttaattttgtaaatattaatttagtaaatattaatcgtttatttggttaggtattgggttttgaatattaattaagataatggtttcgagaatttttgtaagaagtttattagttaattttggagaggttttttgttttggatgaggaaatttaggttttatgagattaggtggtagaggtgggatttgaatttagattatgttagggtgtttttattttttttttagggattttggttttatcgttgagatggattttttttggtttgcgggaggggtattaaatttttagtttatgtgtgggggttgacgggtttgtgagggtagatgtggggtgaggatttgagtagttttagattagatgtaaggtttaaggaggaggggaaaaaagtttgtttgggtcggacgcggtggttcgaggcggttggattatttgaggttaggagtttgagattagtttggttaatacggtgaaattttgtttttattgaaaatataaaaaaaaaaattggtcgggtttggtgacgggcgtttataattttagttattcgggaggttgaggtataagaatcgtttgaattcgggaggttgaggttgaagtgagttgagatcgcgttattgtattgtagtttgggcgatagagcgaaatttcgtttcggaaaaaaaaaaaaaaaaaagaggttgtttgttagtttattgatttcgtagtttcgtaggttcgtagaattttaaggtatgattaggtttgggattattaggttattttagggttaggtgcggaggtttgcgacgttcgagggttaaaggttttttttttcggttatataggagagggtattttgttgggggataggttttttttaattatagtgtagttgtagttatcgtttttagttttttgagtatttttttggttgagtttgttgtttattttattttttagtttttacggttcggttaggttaggcggttttcggtttttttgtagtcgtcggcgggggaggagggtatagagcgcgtttcgttttttagcgtacggttaaggttgcgtttttttttcgggtcgggattaatcgtgggaaaggcgttattttggttattcgattttttttttttaaggtttgtataaggagtttttgaatacgttgttttttttagtcggtagttttattttttttggtttttgttttcgtatttttcgcgttaggttaagcgttgggtttagggatagcgcgttttaattaaattcgtgttcgataagtttttaattaaaagagattttttttcgtttcgtaggcgtttttattattgtttttttcggggggatttgaaggagagggtttgaggtcggtttttgttcgtcgaggtttgcgtgttcggtttgggaggaggtttaggagggttcgcgggttacgggtatttttgggttcgagttttggggtgcggacggacgtttcgagagtgggtgtcgcgattcgggatttacggttttcgtcgggtacggatagttgcggagtagggttttgaggattgtgtagtgttttgggtttttgtttatttttgggtttaggaatggagaagggttcgtttagagaaaattttttcgtagtttttatttcgtttttttttttttttttttttttttttttttttttttttttttttttttttttttttttgtgtttgtttttttttttttttttttttttttagtgtttttttagaaattcggtttttatttcgggtaatagtgggtgttttgagttaaatttcgtttgtaagtttatttataggttttaaagaaggttaggttttaggttttaaaaggaagtttgtggaagtttaaacgtgttcgtttatgtaggagagttaacggggtcgggggttatttttgtttatttagtaggagagaaatggaggttttcgaggttatatgataaaagttagtggttttttaaatttttagtgtgtggtgttgagtagtgtgtgagatttaagtttggatttgtattattcgggagttaggatttgtttttttttttttttttttgtattttgttatattattttttaggtttatgtttttgttgttttagagaagttttttttttttttttttttttttttttttttttgggcggggggtggtggtgtgtgtgtatgagcgttcgtgtgtgtttcgaaaatggaggtaacgatgttttgggttttgtttatcggttgagttttgtttaagtttttggaggtattttggttaaatagtgtaagagtgggagaatgggtgttgtttgatttaatttatttttgagaattttgtgaagtttggagatttagggtagttttgggttaggaggatttgaggttgttggggtggttttgttaggattttataggagtagttttttttagttattgtgtttggattttaggttatagatttcggaatttgtagaggaatgagattttatttttgggtttcggggttaatgacgtatttttagtcgaaggatttttttttttagaggtagtaatagttttttagaagtttgtggggtataagtttaaagtaatttaataataaaaattataaaagattatgttttttaattgaggttttacgtttttttttttattttgggggggggggggaatgttaggatttttttagggggaaattgaggtaaaggatcgaagtattattatggagggaaagggagatatagtgttaggtatattttaaaggaaattggttgtttagtttggggagtgaggaagttggtttttatagtagtggttagggtcggatttttgggcgtaaggtgggttttataggggggaggaggaggagagcgtagggtcgttatttgaaggtttaattggaaggggtttttgtttttttttttattagtttttttttgggtgttatggtgttaggtcgggtagttttagatagataatattattcggtaattattttttttatttttaagattaggttatttaattggtttcgagtaattaatgaaagttggtgcgcgggtttttgatttatagttcggagttaacgcggggttagtttagtagatttatttcgtttgttcgcgttgtttttgcggaagagttgtagtttatttttggggggtgaataattttttttgtcgattaggtaacgagttttatatttaatttgttaggggttcgttgtagaagcggtagagatcgtagaagattgcggtataaataaattgggaaaaagcgaggtgggggttttagttagaaaaggatggagaagtttgttttaaggttatatttagggatttgggtcgtttttttgtcgaaagttttggaggtttgtggggttggattttttttcgttgggggttcgaatgcggggtttagcgtatatttttttcgttcgtggttggtttagatttattgtttcgttttgcgagagtatcgttgatattgtgttttttttcgtcgttttcgtagg

SEQ ID NO: 275 - DNA, 11913 bp, Artificial Sequence
  chemically treated genomic DNA (Homo sapiens)
tttgcgggagcggcggagagaagtatagtgttagcggtgttttcgtaagacggggtagtgggtttgaattagttacgggcggggggggtgtgcgttgaatttcgtattcggatttttagcggaggagaatttagttttataagtttttaggattttcggtaggaagacggtttaagtttttggatgtgattttgggataggtttttttatttttttttgattaaaatttttatttcgtttttttttaatttatttatgtcgtagttttttacggtttttgtcgtttttgtagcgaatttttggtaaattaagtataaaattcgttgtttgatcgatagagaaggttgtttattttttaaaaataaattgtagttttttcgtaggagtagcgcgggtaagcgaaatgaatttgttgggttaatttcgcgttgatttcgagttgtaaattaggggttcgcgtattaatttttattaattattcggagttagttaaatggtttggttttaaaaatgggaagagtaattatcgagtaatgttatttgtttggggttattcgatttgatattatgatatttaagggaaagttggtgagggggaaaataagggttttttttagttgggtttttagatggcgattttgcgttttttttttttttttttttatgggatttattttgcgtttaggggttcgattttgattattgttgtaggagttaatttttttattttttaggttggataattaattttttttagagtgtgtttgatattgtatttttttttttttttatggtagtgtttcggttttttgttttagtttttttttagggaaattttagtatttttttttttttttaaagtgagaaaaagagcgtggagttttagttggaaaatatagttttttataatttttgttattaaattgttttaaatttatattttataagtttttggaaagttgttgttgtttttggggaaaaggatttttcggttaaagatacgttattggtttcggaatttaaggatggggttttatttttttataagtttcggagtttgtggtttgaagtttagatataatggttaaggagagttgtttttatgggattttggtagggttattttagtagttttagatttttttggtttaggattgttttgggtttttaaattttataaaatttttaggagtaaattgggttaaatagtatttatttttttatttttgtattatttgattaaagtgtttttaaagatttaagtaggatttagtcgatgagtaggatttagggtatcgttatttttattttcgaaatatatacggacgtttatgtatatatattattatttttcgtttagaaaaaaaaaaaaagaaaaagaaaaaaaaaaagtttttttggggtaatagaggtatgagtttggagggtggtgtggtagagtgtaagggagggaaggagggggtaaattttaattttcggatagtataggtttaggtttaagttttatatattgtttagtattatatattggggatttgagaagttattagtttttattatatgatttcgagggtttttattttttttttgttaagtgggtaaagataattttcggtttcgttagtttttttgtatgggcgagtacgtttgggtttttatagatttttttttgaaatttgaggtttggttttttttgaggtttatagatgagtttataaacgaaatttggtttagggtatttattattgttcggagtgaaggtcgaatttttgaaaggatattaaaaagagagagagagaaagagagatagatatagagagagagagagagagggagggagagagagagagagagagagagagagagagagagacgaaatagaagttacgaagaagttttttttagacgaatttttttttatttttgagtttaggagtaggtagggatttagggtattgtataatttttagagttttgtttcgtaattgttcgtgttcggcgagggtcgtgggtttcgagtcgcggtatttattttcgagacgttcgttcgtattttagaattcgggtttaaggatgttcgtggttcgcgagtttttttaggtttttttttagatcggatacgtagatttcggcgggtaaagatcggttttaaatttttttttttaggttttttcgggaggggtagtggtgaaagcgtttgcggagcggagggaggttttttttaattagaagtttatcggatacgggtttgattagagcgcgttgtttttgggtttagcgtttggtttggcgcggagagtgcgggggtaggggttaggggaggtaaagttgtcggttggaaggagtagcgtgtttaaaggttttttgtataggttttggagggagagaatcgagtggttaaggtagcgttttttttacggttagtttcggttcgggaggggagcgtaattttgatcgtgcgttaagaggcgagacgcgttttgtgtttttttttttcgtcggcggttgtagagaagtcgggaatcgtttggtttggtcgggtcgtgagagttgaggggtgaaatggatagtaggtttagttaggaaggtgtttagaaggttgaaaacgatgattgtagttgtattgtgattggggaaaatttgttttttaataaaatatttttttttgtgtgatcggaagagggagtttttggttttcgggcgtcgtaggttttcgtatttgattttagggtggtttgatgattttaggtttaattatgttttagggttttgcgagtttgcggggttgcgggattagtggattagtaggtaatttttttttttttttttttttttcgagacggagtttcgttttgtcgtttaggttgtagtgtagtggcgcgattttagtttattttaattttagtttttcgggtttaaacgatttttgtgttttagtttttcgagtagttgggattataggcgttcgttattaagttcggttaatttttttttttgtatttttagtagagatagggttttatcgtgttggttaggttggttttaaatttttgattttaggtgatttaatcgtttcgagttatcgcgttcggtttaagtaagtttttttttttttttttttaagttttgtatttagtttggggttatttaagtttttattttatatttgtttttataaattcgttaatttttatatatggattaagagtttggtgtttttttcgtaggttagaagaaatttattttaacggtggggttaagatttttggaaaaggagtagaaatattttagtatggtttgggtttaaattttatttttgttatttaattttatagaatttggatttttttatttaaaataaggggtttttttaggattagttggtgagttttttgtaaaggttttcgaggttattgttttaattaatatttagaatttagtgtttgattaagtaggcgattgatgtttgttaaattaatgtttataagattaggatgtaagatataatatttaagaatttaaaatatgaatatgtttgtgaagttttgggcggttgtgagtgggtattaataattgtttttgtttgtgtattatggttagattgttttagggatttagagacggttttgattttttttttttggggtttggttttggcgttttgatggttatttttatatttttgagagttgatgtttttgttttttatagtttaagttttgggttaggttttgtatttttggggaagtagtaggaattttggaaatttaaagaataaatttagaatttcgagggttatttttgtttattttaggatagtagtcggagcgttttttatatttaagttgtttaatgagttttaagggttgggtaagatggatttatttgtttttattgtaagataaaatttaaatttggagatggtgtttttaggttatatgatttgaatttagggttttttttttattgggttttttttttagggtggagaagaaggatatatttatttattagttttggtttttttttaattttttttttatggtagttacgtttgtatattatagaagaatttagatattttttagaagtgtaatgtttgttggttgtaaaatttatagttttattttttacgatatgtgataagattttaggtattagatttgttttgaaaagggttggataagggatttaaacgaagcgatagaatttaggttttaaaaattttttagaagtattaaaaagataatggcgtagtagtattttgtgttttaggggtatggattcgatggttttttaatcgtttttaaatagtatatatgtagatagtgttttcggatttattgttttttagttatagatgtttagatgggttgtcgagttttatatttaaagttttaagagggtggtgggtagcgtttttgtatttatggagtataattttaagtcggatttaatttttaggttgtttattttagttgtttttttatagacggggatattgagatttagaaattttttaaaagtaatattagtttgttaaataaaggtggcgcgatttgattaaagaatataagttttagcgattagtaagttgttttaacgttttttgagtataaaatattaattttattaattaaaagtatagagtggaggtaatttttgggtttgtttgcggtttttttataggatagtgattttagattttttcgaagaaaagggcggtttcgatttttttaaggtttcgcgggggtcgggtgtttttggttaggttaaggtaggagcggtttgaagacgcgcgtttagaaggcgcgggtgaaggcgggtaataagggtagagtttttttttcgagttttgggcgaaggtattttttgtaaaagatatattttgttttttacgtattttaaaaatatttcggtttttaggttttcgagtaattttgttttaggaaaagtattcgttattgtattagtaaagcgtttattaaattatcgaattaaatcgaattggtttaggtttttaatagcgtggaaatttattgaaaataaatgaagagggtaaattataggggtttcgtaggttcgggttcgcgtcgtttaggcgaaagagaggtgggcgggtatcggcgcgggatgagaaattaatttgatatttatcgtgtgtcgagttttttttttgtattttgattaagtatagcgaataattttgtttttgttttaattttaggttttgaagaaatattgttttagttgagtttcgcgtttataagatgaagaggcgttttagatgcgttgaaagaaaggttaaagttcgtgtttttttttattgtttgcggtagaatttggtttcgtatagtttggattcggataagttaagtttttttttatttttagaatttgcgtggtcgtcgtttgagcgaagtttagtgaagatttatttttgtattattatacgcgggagttatttacggatacgacgttgttttagaaagttatttagttattggaggtgtatgtgtttattttagttttttacgatatttaatgtgtatttaagtgtgtgttaatatcgtattataagggttggaggtgtttttggatattttagcgttgcggaggtagtatagtataggcgtttattttcgcgttggttttatttcgaatttagagtttagacgtttgaaaagcgttacgtttggtgataatttggcgtttttttaattaataaaattttttttaaggtagagttagatattgcgtcggttttttggttttattttcgtggggattagtagtttcggaatttttcggattttaaggggttttagacgttttttcggtttttgcgaatagttaggtttttagttttgtttggttttggaggatgtcgggggttagtgtttgcgtgtatttttatttttcggttttttttttagtcgtcgttttcgttatttttacggtttttgggaagtagttgggtaagagttgcggttaaaaggggtaggagaggggggtgttttagagcggagagtttttggcgttattgtttcgcgcgtagggggcgtttttcggtttatttattttgattgcgaatagcgggttggttttcgaggtagttgggtaggtagggcgcgttaggaaatattttggtttggtcggatgacgtttggttgggcggaggaggatcgaagggttcgtagcgataggtttcggttgtgttagtgaattggtcggaaaagtggatagtgaaggcgtttaggtattgtttttcgtgcggtttcgcgtcgttttagttcggtttttgtttgatgaaggagtgaggcggcggcggcgggggtggcggcggagtcggtggcggcgcggggtcgtttaacgattcgtaagtcgaagcgttcgggggcgtaaagtttagtatcggcgtttattgcgtcgcgtcgtttataggtagggtatagtcgtcgtcgttatttagggaggggacggcgggtagtagcgcgtttaggtttcgtacgtcggagtttatttgttgcggtttagattcggacgtttcgcggttttttcggttttggagacgtttagcgttggtttcggcggcgtttaatttggtttagatgtcgttcgggtttcggattttttgttgttttggttgttgtaggtatttaggttcggagcggagcgtgtgttgagacgtcggtttcgggatatacgtggaagtcgggttttgtagtaagaggaagtttaggatcgcggcgaggagacggcggggttcgggcgtttgggttgtcgtttcggttttgggtgggtgggtgggtgaatgagtaggtgggagggagggcgggaagtgggggagcggataggcggtcgggttgcggagagttttcgggtgtgggcgttgttttgaattttttattttagttgtttggttgtttttagttttttaaagtttaaataagaggggtcggcggcgcggggaagaggaggagttaggaggttcggtcgttttatttatttagtagtttaagttcggttaggtagcgcgcgttgttttttgggggcgttttcgtagttggggtgagggcgggttcgagggagcgtttttttcggagatatttttttttttaatttaatacgcgtttttagttggtcggtgtggtataattttttttttattttttttttttggttttcgttagtgtgggagtttcgttttattggagagttcgtttaggtaagtagtgagttcgggtagggtcgaatgcggtgggagtagagatggggttgttaatttaaaagagtggtttggagggaggggtaggtaggttttaagagggcgggaattttaggaaagcgtagaaagaatttagttaagttttaaagaagcgtatatttttgttttgtatttttgagtttggtttttgtttttagaattgtcgggtaggggagtggttatgattttggggttattggggaaagaggtggttttttgtgggttttagaggtcgggattgaaagcgaacgttttttagttgggtggtcgggagttgtattagttataagtcgggcgtatttcgatcggttagtagttgtttatttggtgaggtttgcgttaggcggaaggcggttgtcgtttatttaaaattggagttagtagtatttagtttttttttttagtgaggaatatttaatttttttacggttaagtcgggaaaatagcggttagtttaggagggaagaaaatttttgggtaaacgtttaaagtttgcgtatatttcggtcggagtattttggcgtttagtttggggaggaggggtgaaggggagggtttggatacgaagttcggtagggagcgggtaatttttggagttatttcgtcgagtattgtttgtggttttggtcgaggatattattttggttgtttagtgattgattaggaggcggaagttagttaaggggattaaggagtggagtagggagaatttttatcggtttacgggcgcgagttagtgttcgaatttttgggagttcgaagagtttcgttaaatttgatttttttcgtttagtttttgtttggtagttttcgcgttttagagtaggtgtttggggcgggtagggggtgttttggtttggtttttggattttttaaaggagttagtatttattgggaaataatttttaggtaaggagaagaatcgggggtcggagcggagcgtgttttagaggtgcgtataaaattttaggggcgttaggaggtagtagcgacggcgtagcgtgggacggttaggcgcgacgggagggaagtaatcggttgtagttcggttttttgtatttggttggttcgggttggggttgtaagttttttagttaaatttatgtgaagtaaagtagttgtagtttgataaagaatggcgttttaataaatgatatagtaattttttacgttttggtttttagtttgtattgtataaacgttgtcgttattaaattttggttgcggattcgaagtgtgtgcgggtttaggatttattcgaagggcgtattttttgggaatgcgtatttcgtaggcgtaggagattttgagggtaaagatgcggtatttgagtttttcgtttgttttttaggttatttttgttgtttgattttgcgtcgtttttatttagaagtttttaaaattattattaagaaaagaaagattttataagatattgtttttacgttttttgtttagtttttttttatacgatttatttttaaatttttcgcggggttcgcgcgtttggttttttgagtggagaaaggattttcgagataaaatttattgttagttgttttaagaattttttagatttttgtatttttttttttttttttcgtttattatttttatttggaagtcgttttttttaattaggatttaattgtgaggggcgaggagttttttatgaaaagtcggggatttttatttttaaacgaaaagattgagattgtttttttttttattatttttggtatttttagcggggggagaggaggttatttgaagggaggttggtttgaatgtgagtcgttgtgtttgtgaaatttaggtaaggtaaagatacgtaaatttttgttaatattttttaaaaataagtttttgtttcggggtgagggatgtaggggtggataggaggaaaggagagttaagtaaatgtagaattttttttttttttgttatttatttttttagaatttttgtgggggcggggaggggaagagtatcggtgcgaatttcggggtgttttttcgttcgatttggattttttcgattaaagaggtgggaggagttttttgtagtttgcggggttaagaagaaagtgttaagttgaggagtcgtagtcggaggattttagggattcgataggaagttttcgtacgattttaacggatttatatgttcggaagtttaggcgatattaagttagcgttggggaattgacgtatttttgtagtcgtagggcgttttatgtttttttgtttttttttttgttgtgggtaacgttttttgcgggagatttgaggttttttaagggggatatgttagttatattggttttggcgttttgagttaagtattaggatttatagtttagtacgaaggtaggtagtatttttattcgtcgcggacgataggcgtttttttgtattttttttagttcgcgaggttcgtttttcgcgaggttttagagaaaagtaggttgtggaaaattgggcgttttttttttttatttatttttttatttttgttagcgtcgagatttgtagtagaggtttttggtttgaattatcgattggtaaagaaagttgtagattaaatttttcgttttatagagaaggaaattgaggtttagatagtcgaaggagaggtagtttatggagcgtagcggtaaagagtaaggggttggtggttttagaatggaattttagttttgttaggtaattaatagttgtgtgattttagacgagtttcgtagtttttttgagttttagtttttttattggttaaacgggataatgggatattagcgtttattttatagagttgttttgaggattagataggagagtagtgtgggtttttgatttaattaattttatagtttttgttattattattgtttaaggataggaaataagttagtggtaacgtcgagttgaaattcgggttttttaacgtttagttggaggttttatttattatttttttatttttttagagttaatgggatgtagaggcgaggatagtttttggaaaattatgtggcgttgatatattggtaaagcgtaggtatttcggtttcgaaggtgtataattattgtaatatgaaaaaatcgaggttgggtaggagtagggtagtgaggattttttaatttttatttttatttcggcgttgtttattgtatttgatagagcgcggagttgggttgttatagtcgtaattttagggattagtgcgtacgtttgggtcgtttttcgggagttatttagcggtcgcggataattgaataaatattttaaagcgttgcggtcggttaagggcggggatagttatattgcgcgcggggttcgtaggtcgtaataaagagtggttcgatttcgttgttgtttgtcgcgggagaggaataagttttcgattagcgttttttttcggggttcgcgtttcgagttttacgcgtaagatagtttaatagttgtttttttttttttcgtcgattttaatttttcggaatttgtttattcggggttgtagggtaagtgtttaggatggtttttagtttcgcgttggcggtgaaaattttaacgttatttttttaattaaaaaaaggggggggtaagggaggggttttgtgataattatttttagttttttttgattattttaaaattaagtcgattttttttaattagtttttatttattgttttaatttttttcgttgattttatttgggagttcggaatcgttaggtattgtcgaatgcggtgtaaaattttttttttttttttagttcgtagtgtttggagtcgttggggttattcgtttgttttgatgttatcgcgagatggttttcgagtttttcgagagtttttagtgaaaggatttcgcggtattgtttttattattatatcgtaaatttttttaaattttggaattaattatatagaggatatgttttaatttgttttgtattaatgttatagtggggatggaggttaggtcgtggttagagtagatacgtaggtttatgaaattgatgaattgagagttgtttttagttttgagcgtattatttggaattttagtttgaggttataattagaatttttgattttagatttaattttgtaaataataggggaaaaaaatggggaaaagaaaaattacgagagagggaaaaaaaattattttgtatttgtaaaaaaaaaaaaaaaaaaaaaaaaaaaaaaaaagttatataattttaaaattttttcgttttagataattttttttaagtattttttttgtgttttttaatttataaaagataatggaatgttttatagattggattttattttatttttttttttttttttaattgtttttagtttaatagttgttagttttattttagtgttgaatttaattatataggaataaaatattttttagtaaatttgtttgttaaatattttgttatatttattttttttttgagaaatggtttaattatagaaatttatttgtatttaggaattttttttttttttttttttttgatcgttattttagtttaatcgtaagtagagattttatttgtgtagtaattttatttgtgttttaaattcgtttagttaattttttttttttttttttagtaatattttgtttta

SEQ ID NO: 276 - DNA, 2501 bp, Artificial Sequence
  chemically treated genomic DNA (Homo sapiens)
gtagttattttaggttttgtgtaaatgtgtatttttttttagtttttagtttattaagttttgtttgagttatttgtatttgaaatattatttgttatttttttaggttgggatttgtttagtggaaaatagatgatagttatatgttatttagtgttttattatgtggagaatgtttatataaattattttattttattgttattaagttggggaaagatttaggaaatttattttaagatgaggatattgaggttagggtaagtgagtgagtttttatttattttttagttgttttttagttgttaaagattaatttgtgggggtggtttaggtttgatttttgtagtatattttttggggttttttaagtgggtttgatttgtttattttagttgtgattgttttttgataggaggagggagtagtgaggttgtatttattgtttataaaaagtagagtttgtttatgttgagggtttggttgggtgggaggttgtttttataaggtttttttttgttttatataaagtgtagattgatgttttgagatatagttaggattattatttttagagtttaagttttaatttttaggtatgtgattagatttttttatttatttttataagtggttgagagtagtttataattattttggtttggttttttaatagtttgagagtaataatttatatagtttgtagaagtgaatgtatttattttaaaagttttgtgttttttgatgttgttgttgtttgggataggattttgttgttgtttaggttggagtgtagtggtataattttagtttattgtagtatggattttttaggtttaagtaatttttttattttagttttttgagtagttgagattataggtatatgttattatgtttgtttggttaatatttttattttttatagaaataatgtttttttatattgtttaggttggttttgaatttttgggtttaagtgatttttttgttttagttttttaaagtgttgggattataggtataagtttttgtatttagtttaaaaaattttatttttatagtttatgtgtagagtattttggaagttaggtagaaattattttttattttttattatttgggtgatagttgattggtttttgttttttgaaatttattttaaaagtgtatggttttttatgaaaatatttttaattattgatgtgtgaaatgttttgaaatttttggatggaaattttgtattatgaaagaatagaattgttggtggtgtttttgggagaggtttatgagggttgggtaagtttgtgggggtagtaggtagttatttttatggggataggttgatttggtaggtttattttttatggaagtgggtattgaggaataaaaagtagttttaggttaggtgtggtggtttatgtttgtaatttttgtattttaggagattgaggtagggggatttttttagtttaggagtttgagattagattgggtaatatagtgggattttgtttttataaaaaatgaaaaaattagtggagtgtggtggtatattttagtggttttagttatttgggatgttgaggtgggaggattgtttgagtttgggaggtagaggttgtagtgagttaaggttatgttatgagtaatattttgaaggtttatttttgggatttatttaggagttaaatgggttatgtttagttaatttagtatttattaaggtatgtttttagattaaatattatattgtttatagattgatatgttttaaaaatttggtagaggtgggtatggggttaggtagaaattattttttttttttttttttttattaaattttttggtgatagaagtttttttgtaattggggtagaatggggttagatattttggtaatttatttattggtgttatgaaatataaaatattaatgtatttatataaaaagtgatagatgaaattaaaatttgttgttttattaaaattatattagattttaaattattatagagattatattttaatgttttaaatgtatttgatatattataaaattattttagttataagtatattattaaagttattttttattattataaaatgtttttataatgttatttttgataataggaaaatatttatttttattgaaatatgtggagtattattttttggaaattatgttaagtataatggtaatatttaggtttaatttttttatagatttgtttaatatttatttaaattttagtttttattttttttatatgttattagttatatttttatttaaaaaattggaggttgaaggggtaagtaaataaatttttgaagtagataaagtttatttttaattaatagattttagagtttagtttttttaaatttgtttttaatgatagaaattttttttttttttgttttattttgttttttttattaaatggtattgtgttaataaaatttttaagtgatttttttaaattagtgtt

SEQ ID NO: 277 - DNA, 2501 bp, Artificial Sequence
  chemically treated genomic DNA (Homo sapiens)
aatgttgatttaaagaggttgtttgggaattttattgatatagtattatttaatggggaggataaaatggggtaggggagggagaagtttttgttgttaaaaatagatttggaaagattggattttaaagtttgttgattaaagatgagttttgtttattttaaaagtttgtttgtttatttttttagtttttaattttttaagtgaaaatatagttaataatatgtgaaaagaatagaagttaaggtttagataaatattgagtagatttataggaagattgaatttgaatattgttattatgtttgatatggtttttaaaaaatggtattttatatattttagtgagggtaagtatttttttgttgttaagaatagtattgtaaaagtattttgtaataataaagaatagttttaatgatatgtttgtaattaaaataattttgtaatgtattaaatatatttaaaatattaaaatataatttttataataatttaaaatttaatatggttttaatagaatagtaaattttaattttatttattattttttatataaatatattaatgttttatattttataatattaatgggtaagttgttagagtgtttgattttattttgttttagttatagaaaagtttttgttattagaaagtttggtggggaaggaagggaggaagatgatttttatttaattttgtgtttatttttattaggtttttgaggtatattagtttatggataatgtggtgtttggtttggaaatgtattttggtgaatgttgagttggttggatatgatttgtttagtttttggatgaattttagaagtggatttttaaaatgttatttatagtatgattttggtttattgtaatttttgttttttaggtttaagtgatttttttattttagtgttttaagtagttgggattattggagtgtgttattatattttattaatttttttattttttgtagaaatgaggttttattatattgtttagtttggttttgaatttttgggttgaagggatttttttgttttagttttttaaagtgtaaggattataggtatgggttattgtatttggtttgaaattgttttttattttttagtgtttatttttatgggaaataagtttgttaggttagtttgtttttatgggagtgattgtttgttatttttataggtttgtttggtttttgtgagttttttttagagatattattaatagttttgtttttttatggtataagatttttatttaaggattttaaagtattttatatattaataattagaagtatttttatagaggattatatatttttaaaatggattttaaagaataaaaattagttaattattatttaggtaatagaaaatgggaaatggtttttatttgatttttaaaatgttttgtatatagattgtgaaaataggattttttaagttgggtgtagaggtttatatttataattttaatattttgggaggttgagatgagaggattatttgagtttaggagtttaaaattagtttgggtaatatagggagatattgtttttataaaaaataaaaatgttagttaggtaggtgtggtaatatgtgtttgtagttttagttatttaggaggttgaggtgggaagattgtttgaatttgggaggtttatgttgtagtgagttgagattgtgttattgtattttagtttaggtgatagtaagattttgttttaaataataataatattaaaaaatatagaatttttaaaataagtatatttatttttataagttatgtagattattatttttaagttattaaaagattaagttaaaataattatgggttatttttgattatttgtaggaatggatagagaggtttggttatatgtttggaaattagagtttgagttttgaaaatgataattttgattatattttaaagtattagtttgtattttgtatggagtaagaaaaagttttgtggaagtggttttttatttagttgagtttttggtgtggataagttttgttttttatgagtagtgggtgtagttttgttgttttttttttttgttaaaagatagttatagttggggtgagtagattgggtttatttgggaggttttaaggaatatgttgtaggggttgggtttgagttatttttatgggttggtttttgataattagagagtagttgagaggtgggtaaaagtttatttatttattttgattttagtgtttttattttaaaatgggttttttgaatttttttttggtttagtggtaatgaaataagataatttatgtaaatgttttttatatagtaaagtattaagtaatatatgattgttatttgttttttattagatagattttaatttggaagagtgatagatggtattttagatataagtgatttaagtaaagtttgataaattgggggttggaaaaaaatgtatatttatataaagtttggagtaattgt

SEQ ID NO: 278 - DNA, 3201 bp, Artificial Sequence
  chemically treated genomic DNA (Homo sapiens)
ttttttttgaaaattgttaataaaaatttgttggttttatggtttagggggtattatggaatttgtggatatgtgatgttttttttggatatttggttttaaaatgttttttttttgtattttttttttttattttttaggttagttgatatttagggaaaataggaaaggatttatgtgaaatattgggggttgaattttttttgataataagttttttaaaaaagatttttaaatgaaatttttttgttttttaatttttatttttgttttgggggtatatgtgaaggtttgttatataagtaaatttgtgtttttggtgtttgttgtatagaatattttattatttaggtattatgttgagtatttaatagtttttttttttgtttttttttttttttttattttgtattttggagttaattatagtgtttgttgtttttttgtttgtgttataagtttttattatttagtttttatttataagtgagaatatttagtatttggatttttgtttttgtattagtttgttaaggataatagtttttagttttatttatgttttataaaagatatgatttagttttttttaatggttgtattaaatgaagttttaaagatataatataaatattaattttttttttattataaaaattttttgttgaatttgattatatttaaattaatgagttttgttttatgaaagattttttggataaatttgatagttgatggaataggagaagttgtttgttatgtttaaagttaataagagattaatatttagaataaatggagatttgtaaattaatagaaagtaggtagtaaagttaaagaaaatagtttaaggtatagttattaaaaggaatgtgattatgttttttgtagggatatgggtggagttggaagttgttagttttagtaaatttatataggaatagaaaattagtgagattgtatggttttatttataagtgggagttgaataatgagaatatatggttatatggtggtgattaatatatattggtgtttgttgagtggggtgttggggagggagagtattaggaagaatagttaagggatattgggtttaatatttgggtgatgggatgatttgtatagtaaattattatggtgtatatatttatgtaataaatttgtatattttttatatgtattttagaattttaaataaaagttggatggttaggtgtggtggtttatgtttgtaattttagtatttttgggaagttgaggtgtgtagattatttaaggttaggagtttgagattagtttggttaatatggtgaaattttgtttttattaaaaatataaaaattagttagatgtggtatgttatttataattttatttatttgggaggttgaagtagaattgtttgaatttgagagtggaggttgtagtgagttgttgagattgtgttattgtattttagtttgggttatagtgtgagattatgttataaaataaaataaaataatataaaataaaataaaataaaataaaataaaataaaataaaataaaataaaataaaaaaataaaataaaataaaataaaataaaataaagtaatttttttttttttaagtggtttttattttttttttttgttttgtgaagtgggtgtgtaagttttgggattgtagtggttttagggaatttttttttgtgatgttttggtgtgttagtttgttgtgtatattttgttgtggttttttttttgttgtttgtttattttttaggttttgttgggatttgggaaagagggaaaggtttttttggttagttgtgtggtgattttggggattttagggtgtttttttgtggttgatgtttggggtgtagtggttgttggggttggggttggtgggagtttgtgggattttttagaagagtggttggtgttgtgatttagtattggggtggagtggggtgggattatttttataaggtttggaggttgtgaggttttgttggagttttgttgttgtagtttttgttattagtgagtatgtgtggtttgtgtttttggggatggggtttagagtttttagtatggggttaatttgtagtattaggtttgggtttttggtaggttttttgtttattttgagatttgggatgggggtttaggggatttaggatgtttttagtgttgttagtggtttttagggggtttggagtgttttggggagggatgggattttgggggtggggagggggggtagattgtgtttattgtgttttggtatttttttttgggttttagtaaatttttttttgtttgttgtagtgttgttttatattgtggtttattttttagtttgaggtaggagtatgtgtttggtagggaagggaggtaggggttggggttgtagtttatagttttttgtttatttggagagatttgaatttttttatttttttgttgtgtggtttttattttgggttttttttttgttttttgttttttttgttatgtttgttttttgttttagtgttgtgtgaaatttttggaggaatttgtttttttgttttttttttgtatttttgatttttttttgggttgttgtgaggtggagttggtttggtttttatattttgtatttttttttttttgtaggttgttgtgtggttttgtgtatgttgttggtagattagggttagagttggaaggaggaggtggtgattgtggagatgtggtaggagggtttatttaaagttttttgtgtaagtgattatgtttgggtagggagggggtgttgggttttagggggttgtgattaggattgggggatgtttaagtttagtgtttttttttgagttatgttttttttaatagttatatgggtagttttttaagttttaggatggagattttattttgtattagtttaatattattttgtgttatttgggttgtatttttggtgagttttgaatttttaagtttaggtaggtatgggtaagtttttgtttttggagtttttttgtttaaattagttgttttgtagttttttggagtggaggaaattgagatttattgaggttatgtagtttgtttaaggttaagtttgggtgtttgtaatttttgttttgtgttaggttgttttttaggtgttaggtgagttttgagtatttgttgtgtggtagttttttatttttttatgtat

SEQ ID NO: 279 - DNA, 3201 bp, Artificial Sequence
  chemically treated genomic DNA (Homo sapiens)
gtgtgtggaaggatgagagattgttatatagtaggtgtttagagtttatttgatatttgggaggtagtttggtatagggtaaggattgtaggtatttaggtttgattttgggtaaattatgtaattttagtgggttttagttttttttattttagagggttgtggggtagttgatttaaataaaagggttttgggggtagaggtttgtttatgtttgtttggatttggaggtttaagatttattaagggtgtggtttaggtgatgtaggatggtattggattggtatagggtgaggtttttgttttggaatttggggagttgtttgtatagttgttgggggaggtatggtttagggaggggtattgagtttgggtgttttttgattttagttatagttttttaaggtttagtattttttttttgtttgggtatggttatttatgtaggaggttttgagtgagtttttttgttatgtttttatggttattattttttttttttagttttggttttgatttgttagtagtatgtgtagggttgtgtagtggtttgtggggagggagaagtatgagatgtggggattgggttgattttgttttgtagtaatttggggaggggttaggagtgtagggagggaatagggaaataggtttttttgaagattttatataatattggggtggggagtaggtatggtgggagaggtggggaataggaaggaggtttggggtaaaagttatatgatggagggataagggggtttggatttttttgggtgggtgaggggttgtgggttgtagttttagtttttgttttttttttttgttagatatatgtttttattttgaattgggaaatagattatggtgtagggtggtattgtagtgaataaagaaaagtttgttggagtttgggggaggatgttaaggtgtggtgagtgtagtttgttttttttttttgtttttggggttttatttttttttgaggtgttttgggttttttgaaagttgttaatggtattggggatgttttgggttttttaggtttttgttttgggttttgaggtgggtgaggagtttgttgggagtttgggtttgatgttgtgggttggttttatgttgggagttttgagttttatttttggggatgtgggttgtgtgtatttattggtggtgaagattgtggtggtgaaattttagtgaagttttgtggtttttgagttttataagggtggttttgttttgttttgttttagtgttgagttatggtgttggttgtttttttggagggttttgtggatttttgttggttttagttttggtggttgttgtattttgggtgttggttgtagaggggtgttttggagtttttggagttgttgtgtagttggttggggaagttttttttttttttttaggttttagtggggtttagggagtaaatagatagtaggaagaggattgtagtgaagtgtgtgtagtgaattggtgtgttgggatattgtggggggaaattttttaagattgttgtgattttggagtttgtatatttgttttatagggtaggggagaggggtggaggttgtttagaggaaaggaaattgttttattttattttattttattttattttatttttttattttattttattttattttattttattttattttattttattttattttgtgttattttattttattttatgatgtagttttatgttgtggtttaggttggagtgtagtggtgtgattttggtggtttattgtaatttttgtttttgggtttaagtaattttgttttagttttttgagtaggtggaattataggtggtgtgttatatttggttgatttttgtatttttagtagagatggggttttattatgttggttgggttggttttgaatttttgattttaggtgatttgtatgttttggttttttaagagtgttgggattataggtgtgagttattatgtttggttgtttaatttttatttgaagttttggggtatatgtagaggatgtgtaggtttgttatataggtgtgtgtgttatgatggtttgttgtatagattattttattatttaggtattaagtttagtattttttagttattttttttggtattttttttttttagtattttgtttaataggtattagtgtgtgttgattgttgttatgtgattatgtgtttttattgtttagtttttatttataagtgagattatgtggttttgttggttttttgtttttgtgtgagtttgttgaggttaatggtttttagttttatttatgtttttgtaaaggatatgattatgttttttttagtggttgtgttttaggttattttttttggttttgttgtttattttttgttgatttgtagatttttatttattttagatattgattttttgttggttttagatatgatagatagttttttttattttattaattgttaagtttgtttaaggagttttttatgaaataaaatttgttaatttaagtgtaattaaatttagtaagggatttttgtggtggggaagaggttggtgtttatgttgtatttttaaaattttatttaatgtagttattaaaaagaattagattatgttttttgtgggatatggatggagttagaggttattatttttagtaaattaatgtaggaatagaaatttaaatattggatgtttttatttgtaagtgggagttaaatgatgagaatttataatataaataaggaaataatagatattgtggttgattttagggtgtaggatgggaggaaggagaggagtagaaaagagaattattgggtatttggtataatatttgggtgatgaaatattttgtataataaatattgaagatatgagtttatttatgtaataaatttttatatgtatttttaaaatagaaataaaagttaaaaaataaagaaattttatttaaaagttttttttaagagatttattattgggggaaatttagtttttaatattttatgtgggtttttttttattttttttaagtgttggttggtttgagaaataaagggaaagagtataaaagagagatattttaaagttgggtgtttaggggagatattatatgtttgtaggttttgtgatgttttttgagttgtaaaattagtgagtttttattagtaatttttaaagagga

SEQ ID NO: 280 - DNA, 2501 bp, Artificial Sequence
  chemically treated genomic DNA (Homo sapiens)
  unsure (1099, 1139, 1661, 1781): unknown base
tttttatattttgttagttgtgtttttgtggatagttatgagtttagaggaaaggggtatttggttttaggtttgtgtttttgggtggtttttatttgttttttttttttttattggtttttttttttgtttagttttttttttaggaaatgttttgattttttttagttttttttttatttttttttgtttgtttattttttttttagaatagttttttattttttttttttttttagttgattttttttatttttttgattttttttatttttttattgtggttttttgttataggggtttttattttgaattttttttttttattatttatggtaggaatttagtataggttttttatttagggttttttatttttggtttttgtgttgggagaaatttttaggtgtggatagtttagtttgaggtattttagtgttggggtattgttgtttaatttggtttttagttttgtttttattttttggaaaaattgatattgatataggggttttttttttgtttttttagttggtattttagtggggaggtttttttattaagaatgagtttttgaaatttagggttagagataaggataatttaggggaagatggggtttttggtggagttaggggtaaattttaatgggattagtgggggatattttagagtttatggtttgattgtatagtttgtttggaggatgggtgtgtagttttgttttttttgaggtttaggattatgttagaagtgatggggtattgtgtaggggagttaaggttagtagtttgggggtaggagttttttagagttttagaagattgggttttttggagtatagggtttttggttttttttttaagattttttttttagttggaaggttgatgattgggtggttgggagggagatttagtttttttttttgttttgtttgtagtattggttttgtttttttaataaatttttagttatgaaatatatttgattttttgttgatttgtttttgggattggggagggaggtaggtttaagtttttgtatttgtgtgagggtggttttttttggtttttttatttagtgggtgtagtttatnttaggtttttgtgtaggggtagaagagagtagtggggttnggggtttttggttattgttttattgttgtttggtttgagtatagaaaatggaagtggttttggaagagtttgtgtataaggtaggaaatatataaatgaagaggagggagttaaagagattgtgttttagtttagtttagtttgggtttgggatggggggttgttggggtgtatgtaataaatatggtttggggttgtagggaagggaagggagggtattgtgggagtgggagatttggtggtaggttttttgttttttgattttagaattttttgtttttggtgattgaggaaggaagggttggttttggggttagtgttatttgtgtaaaatgaggaattttatattattagttttggggtgggtgggagtgggggtgtggggggttttttggttggtttagttttttttttattttttaattttgtttgatgttttgattttagtggggagatttatagtgagaatgggtgtggttgtaagggttggaggtagggttaggagtgttttgatagtgatantttttttttttttaagagtagtgtggagttgggggagggggttgatgaattataggaagaggtgggaggggtttggggttttttttggttaaagttgatattaaaaatataaattttttnttattttattttatttttgttttggggtttttttttgatttttgagttaaggtatgaagtagtgaggttaggtgaggttgttgagaggtggagttgttattgtggtgatgttgtggttgttttgggtatagtgggttttgtgtgttgtttttgttgttttttggggtgtgggttagggttgtgtagtagtgatagagtgggttggtgaggggtgttttaggtgggagagaaatggttgatggtttggttgttgggtttggttgttaggtgagtgttttggtttagtattttggttgttttgttggggttgaggtttagtttggttgtgaatttggttagtgggtagaggttttttagtgttattttggggttgtgtaggaagtgtgtggtttgtgttagtagtttggttgtggttgttttgttttgttgttttaggtttagttgtttggttgtgaggtgagttatagtaaagatgtttttggggaagttgagtttgtttttgttgttggggttggggatgttggggagtttttttaagtttgttagtgttttggttgtgttggttgtgttttttatggtgtgtatttttatgtggttgatgaggttgtgttgttgtgtgaatttgttgttgtatatttggtatttgtagggttttttgtttgagtggatgtgtatgtgttttgtgaggtggtattggtgtgtgaattgtatgttgtatgt

SEQ ID NO: 281 - DNA, 2501 bp, Artificial Sequence
  chemically treated genomic DNA (Homo sapiens)
  unsure (721, 841, 1363, 1403): unknown base
gtgtgtggtatgtggtttatgtgttagtattgttttatggagtatatgtgtatttatttgggtgagaagttttatgagtgttaggtgtgtggtggtaagtttgtatagtaatgtaattttattagttatatgaagatgtatgttgtggggggtgtggttggtgtggttggggtgttggtgggtttgggggggttttttggtgtttttggttttgatggtaagggtaagtttgatttttttgagggtgtttttgttgtggtttgttttatggttgagtagttgagtttgaagtagtaggataaggtggttgtggttgagttgttggtgtagattatgtattttttgtatgattttaaggtggtgttggagagtttttatttgttggttaagtttatggttgagttgggttttagttttgataaggtggttgaggtgttgagttagggtgtttatttggtggttgggtttgatggttggattattgattgttttttttttatttagagtgttttttgttagtttgttttgttgttgttgtgtggttttggtttgtattttagggagtggtgggggtggtgtgtagggtttattgtgtttgggataattgtagtgttgttatagtggtggttttattttttggtggttttatttggttttattgttttgtgttttagtttgggggttgggggagaattttgggatgggggtgggatggggtaangggaaatttatatttttgatattagttttgattaaaggagattttaggttttttttgtttttttttgtggtttgttggtttttttttttggttttgtgttgtttttagagggggaggggntgttattgttggggtatttttagttttatttttggtttttgtgattatatttatttttattgtgaatttttttgttggggttggagtgttgggtagagttggggagtggggaggggattgagttggttggagggttttttgtatttttgtttttatttattttgggattgataatgtgaagttttttattttgtataagtggtattagttttagggttaatttttttttttttagttattaagggtggggagttttggagttggaaggtgaagagtttattattaggttttttatttttgtggtgttttttttttttttttttgtggttttggattatatttattgtatgtgttttggtggttttttattttgagtttaggttgggttgggttggaatgtggtttttttagtttttttttttttgtttgtatattttttattttgtatataggtttttttagagttgtttttattttttatatttgaattaaatagtaataaagtagtaattaaggattttngattttgttgtttttttttgtttttgtataaggatttggnatgggttgtgtttgttgggtggaggagttagaaagggttatttttatataggtgtagaggtttggatttgtttttttttttagttttagaaatagattagtaagaggttaggtatgttttataattaaaaatttattaaggaaataaaattagtgttgtaaatgggatagaaaggagagttgggttttttttttgattatttagttattggttttttagttggggagagaattttaaaggagaggttggggattttgtattttaaagagtttagttttttgagattttaggggatttttatttttaaattattggttttggtttttttatatggtattttattgtttttggtatagttttgggttttagggagggtagagttgtgtatttattttttaggtaggttgtgtagttaggttatgggttttggggtattttttattggttttattaagatttgtttttggttttattgaaaattttgtttttttttaagttgtttttgtttttggttttgggttttaggaatttatttttggtaaggaagtttttttattgaggtattagttaaaggggtaaggaaagggtttttgtgttagtgttagtttttttggggagtgagggtaaagttagaaattaggttaggtgatggtgttttagtattggaatgttttaggttgggttgtttatgtttggaagttttttttagtataggagttgagggtggaaggttttgggtgggagatttgtattaggtttttgttatgggtagtagagagggaaagtttagagtgagaatttttatgatgaggaattgtggtgaagaaatgaaggggattagggaggtgaaaaggattaattagaaggggaagaagggtgaggggttattttggagggagggtaggtgggtaaggaggggtgaagggggagttgaggggagttaggatattttttgaagaggaagttagatggaaagaaaggttagtgaggagagagggagtaggtggaggttatttgagagtatgggtttgagattagatgttttttttttttagatttatgattgtttatggggatgtaattggtgaagtgtgaggg

SEQ ID NO: 282 - DNA, 3025 bp, Artificial Sequence
  chemically treated genomic DNA (Homo sapiens)
tttttatgatttgatttttatagttgttttatttatgggttttttataaattaggggtatagaggagtattgaaagttagtttagaggtgagtgtgtgtagttagtgttttttgtggatatagtagttgggtgttggagaggtttggaaagggtgtgttggagagttaagtgttagttgtttagggtttgttggttgttttttttttttttgtttggtaggggatttagtgtgtatgttagtgtggaggggtgggttggttggttagttttgggttttttggttattttggggattttttttaagttttgtttttgagtgtttttattggttttggatttttttttttttagttgtttgtttgggttttggggtgtttaggttattatggataaatagtttagggtgtttggttgagaagttaggggtgaggaagttttggggtgttgttgttgttttttttaattataaattaggttggataggagagggaggggtgggggatagtgggtggggatttagattgttagtattttgttatttatagttggggtttttgagtggtagaaagttttggttattttttgttgtttgggttgggtgaaagttaggattgtgttgtgttattgttaggatatggagttattgttgttattgttttgtgatgtagatttgatggtttttgatggttttttttgtttttttgttataatggatgatttttatgatgatttgtgttttgattttttggatttgtgtttttttgaagatttggatttgtgtttgatgtatgtgggtgtgtttttgaaatttgaagagtatttgtatttttttgtggtggtgtatttggttttgggtgtatgtgaggatgagtatgtgtgtgtgtttagtgggtattattaggtgggttgttgtttattgtgggtttgtaaggtgtgtaagtgtaagattattaatgttgattgttgtaaggttgttattatgtgtgagtggtgttgtttgagtaaagtaaatgaggtttttgagatatttaagtgttgtatgttgagtaatttaaattagtggttgtttaaggtggagattttgtgtaatgttatttgttatattgagggtttgtaggttttgttgtgtgattaggatgttgtgttttttggtgttgtagttgttttttatgtgttgggtttgttgtttttgggttgtggtggtgagtattatagtggtgattttgatgtgtttagtttgtgttttaattgttttgatggtatggtaaggttgggattttaggaagtgaggaagttagggtggtgtttgggatattagggatgtgtttttgagggtggggagttggttttgtgggaggtttgggttaggattttttttgagagagaggatttttttgttttgggtagttgttattggggtagtttgttttggaagtgtgtgggtaagtgtttgagttgttttattgggggtgttattagaatattgtagtgtgaatgtgaagatttttttttttatttatttttatttttaaaatgtaaatttgtgttttttggtgattgtttgtttttggtttggttttgtatgttgtagattttattttttatttatttgtaattatttttttaattaggataggtttgggtttggaattagagttttaggttagagttagggagggggtggttataggaattggtgtttgggttttgagttgttttgtgggtttgatttagttgtttttgttgtttgtagatggattatagtggttttttgagtggtgtttggtggtggaattgttatgaaggtgtttattataatgaggtgtttagtggtgggtattttgggtttttttttgtttgtttttttttttttatggagttgttttggtttttatttaggatgtttttatttttatttatatatgtttatgttttgggaagtggtgtaggagatgaaatattaagtaagtagttttttgtttttttgattgttttggattttaattaaagtttttagtttttaatttgttttaaagtattgggtttgggggtgggaggtttgttgtggttttatttttgtttattaattgagttttttttgtgtagaatttaggtttgggaagagtgtggtggtgttgagtttagattgtttgtttagtattgtggagtgtatttttattgagagttttgtggtgtttgtttttttgttggtggatgtgttttttgagttgtttttgtgtaggtaagaggttgttgtttttagtgagggagagagtagtggtgattttatttagttattggatgttgttttgtagtgttttgtgggtgtgaattttaatttgatatattaggtgttttgaggggatggtggttgtttatttgtttgagggatggtgtttttagggttttttgtgtttaaaagattgaatttaaatgttttttttttaatagtgttttaaaagtgattttttttgaggtaggagaggtgggagaattgaagtttttgtttttgttttatagggtaaggatatagtgtggttttttttatgtagtattttttttggagatttattgtgatggttgttttgtgttttttggtgggttagagttgaattttgaggggttaggtttagtttttttgtgtttttttttatgggggtgagatttttgtagatttaattttgttttgggatgtattggttatttgggggggtgtgagatttagtgtattttggttttaaatgtagtaggtgtaattgtaatttatttttaatttgttttttggtttaggattattttttgtaatatttttgtaatttatttttgtaaataagagttgttttgttagagtaggagtttttggggttgtatttatttttgaggtatggtgtgtggtgttatagggaatttgtatgtttatattgtaggtgggtgagttgtgggtgtttgtttaggtgattaaaataaaggtgttaatttatattgttgtggttttggttttttttggatatgggtgtgggattt

SEQ ID NO: 283 - DNA, 3025 bp, Artificial Sequence
  chemically treated genomic DNA (Homo sapiens)
ggattttatatttatgtttagggaaagttggagttatggtggtataaattagtgtttttattttgattatttgagtgagtgtttgtggtttgtttgtttgtggtataaatgtataaattttttgtagtattatatattatgttttagagataaatatagttttaggggtttttgttttggtaaagtaatttttatttataggaatagattataaaagtattataaaaagtggttttgaattgggaaatgggttgggggtgggttatggttatatttgttatatttgggattggagtgtattgggttttatgtttttttaaataattggtgtattttggggtagggttaggtttgtgagggttttatttttatgggggagggtgtgagaaagttgaatttagttttttaaggtttagttttggtttattgaggaatatggagtggttattgtaatgggtttttgagaagggtgttgtgtggaaaaaattgtgttgtgtttttgttttgtggggtgggggtggaaattttagtttttttgttttttttattttaagagaagttgtttttaaagtgttgttgggaggggggtatttaagtttaattttttgggtgtgagggattttaggggtattattttttgggtgggtgggtggttattatttttttagagtatttggtatattgggttggggtttgtatttgtagggtattgtggggtggtgtttggtgattgggtggggttgttgttgtttttttttttgttgggggtggtagttttttgtttgtgtggaggtgatttagaaggtatgtttgttagtaggagggtgggtgttgtagggtttttggtggagatgtgttttatgatgttggataggtagtttaggtttgatattgttgtattttttttgggtttgggttttgtgtggggagggtttggttagtaagtaggggtggggttgtgataagttttttatttttgggtttagtattttgagatagattggaaattgaggattttagttagagtttgggataattgaaaagatagggagttatttgtttagtattttattttttgtattattttttaggatataggtgtgtgtgagtgggggtgggagtgttttagatagaggttaggatagttttatgaaggaggaggagtgagtagggagaggtttggaatatttattgttgggtgttttgttgtagtaggtgtttttgtagtagttttgttgttgggtgttgtttggggggttgttgtagtttatttgtaaatagtaagggtgattgagttaggtttgtgggatggtttgaggtttgaatattaatttttgtagttgttttttttttaattttagtttaaggttttagttttgggtttagatttgttttggttgggggggtaattatgggtgggtaggagatgaggtttgtaatatgtagggttaaattaagggtggatagttattaaggggtgtaaatttatattttggaagtagggataagtagagaaaaagatttttatgtttgtgttgtagtgttttaatagtgtttttaatggggtagtttgaatgtttgtttgtatatttttaaaataggttattttagtgatagttgtttaggataagggggtttttttttttgggaaggattttggtttaaattttttgtaaggttagttttttgtttttggaaatgtgtttttgatattttgagtgttgttttaatttttttattttttggggttttggttttattatgttgttggagtagttggagtgtgggttggatgtgttggagttgttgttgtagtgtttgttgttgtggtttgggggtagtgggtttggtgtatagaaggtggttgtggtgttagggggtgtggtgttttggttgtgtagtagagtttgtaggtttttgatatagtggatggtgttgtgtaggatttttattttgggtaattgttggtttggattgtttgatgtgtagtgtttgagtgttttaaaggttttatttattttgtttaggtggtgttgtttgtgtatggtggtggttttgtggtggttggtgttggtggttttgtgtttgtatgttttgtaggtttatagtaggtagtggtttgtttggtggtgtttgttgggtgtgtgtatatgtttgtttttatgtgtgtttggggttgggtgtattgttgtggggaagtgtgagtgttttttgggttttaggagtgtgtttatgtgtattaggtgtgggtttaggtttttgaagaagtgtaggtttggggagttgaaatatgggttgttatagaagttgtttgttgtggtaaaggagtagagagagttgttgggggttgttaggtttatgttgtggagtggtggtgatagtagttttatattttggtggtggtgtggtatggttttggtttttgtttaatttaagtggtagagagtggttggaattttttgttgtttgggagttttggttgtagatagtaaagtgttggtagtttgaatttttatttattgttttttattttttttttttttgtttggtttgatttgtggttaaggaaagtggtggtagtgttttagggtttttttatttttagttttttggttaggtgttttgggttatttatttgtagtagtttaaatgttttggagtttaggtgggtagttgggggagggggagtttgaggttaataggaatatttgggggtggggtttggggggggtttttggggtggttgaggggtttgagattggttagttagtttgtttttttatattggtgtgtgtgttaggttttttattgggtagggagggagggagtgattggtaagttttaggtggttgatatttggttttttggtatgttttttttaaatttttttaatatttgattgttgtatttgtgggaaatgttggttgtgtgtgtttatttttgagttgatttttaatatttttttgtatttttgatttgtgggggatttatgggtagagtggttgtagaaattaggttgtgagag

SEQ ID NO: 284 - DNA, 10224 bp, Artificial Sequence
  chemically treated genomic DNA (Homo sapiens)
agtttttatagttttagtattgttttttttattttattttgattgtgtttttgttgtttatttttgtttatttattttaattttagtgttttttttagtttttgggttttaggtgatatattagttagtgggatatgggtttttataggtatttttagtttaatttagttttttttttttttttggttttttggttagtatttgtattatattggtttttattggatatttttgtagttttgggttttttttatagatatattgttggattagttgtttaatttggtttatttgtagagttttttggtttatttgattttaattgaaatttagttttttaagaaggatttggtgttggaataggtaggtattggaaagttagttgtttaggattattgttttattttattagtatttttttgttattttttattttttttttttagattttagaaatttgggagtggttggagtgagaaaatagaggtaagtggtaggtaattgttaagtattagttttagtatgtgtttagttttttagagtaggatttgtggttgtaggtgtgaaggtaaggtttgtggaaatggtagggagggtggaggggatgtaggaggtatggatgtgggtggggtgtttttattttttagggttagttagatttttttgatttttttttaggtgggttgagatttataggttggatgtgttagaggtagtggttttagagtggttttgttgtgtttattgtagtgtagaggtttttaagtgttgtttatgatgttagaatgagtggtattgttgtaggtgagggtattttagaattttggatttttaagttttatttttatattttttatatgtattgttatttttaatatttatttgtttgtagggagtgttaagttaagtattgggaaaagtatggaaagatttgtgttttggtagtttagggtgatagagttaaatgagggttgtagttgttgagggttgattatttatgttaagggaatttatttagaatgtatttttgaattttaagattatggtttagtttttgttggagttttagtttttgtagtggagagtagagtgggtggtaaagttgttgattgattttttttttttttattttaagtgaaggtttgagattttttgttttatttagtgggtaggttaagtgtgttgttttagtaaattggattaggagggttagggttggatgtggggattttttttttttagtatagtaaagttggtttttagaaatatgggtatttttgtgtggtgttttgtggttgttgttgttgtggttgtttggggtggggtgtgaggaggggatgaaggagggaaggaagggtaaggtggggggggttttgtgagagtgtgtttagttttgtttttgggttttatagtttttgtatttaggtttttattgtgtggttttttttagtttttttttgttgtttagtttggattttgggggaggtgttgaagttggggtttgttttgtggttttgtttggtttgtgtttgttagtgtttaaagttagtgaagtatgggtttaattgggttatgttgggggagtttgagtttattgagttgtgggagttggtatttgttgggtgtgttgggaagggttgtatttggttggagtgtgttaatgtgttgtgtattgtgtggggtattgtgtgtaattttatatggtagttggtttttggttgtggttattgtttttagtttgtggggtttgttatgtatatgtggtgtgatttttgtggtgattttatttggggtgttgtgtgtaaaggtttgtagtgtgtgtgtgagtagtggttttgtgtgtttatgagagtggaaggggtagttaaggggtagtgtagttgttgtgggttaagttgtggtagagggggttggtggggatagtttttgaggattaggtttgttatttttgttttattgttgaagagtgtgtgaaaatggtttattttttgttgtattttatttgtatttgggttatagatgagtagaggtggttgtttatatgtaaaaatatgttgattttaagttttttatttttaaaatgttttggttttttttgagaaagggtttgtgtttattgtttttggagtttatttttttaggtttgtttttttttaaatatttatgattttttttagaatttttagggtgaagggaaattattatttatgggagggagtttggaaaaatttagaatttttggtgggttttttgtaagtaggagttttgttgagtttttatttagtaaatatttttttttgatttagtgaattagatgttaaaatatgtatgtagttatatatttagtagtttttttgtatttttgggaattgttagtaagtaaaggttgtttttttttgggtagatattagttggaattattaggggtgtttttatagttttttttgttagtttggattttattgtagatttgttgaattaattgttgggagtggattttaggtattagtaaattttaaaaattttttaaattattgtaatatggagtttgggttgagtattattgttttggtttatttaggaatttgtggatggatagtgttttaggtttgtgtgtgtatggagatttttttatttggtataagaggatattataaatttagttggggggagtataaagttgtgatagaatgtaaagaatgaataaggggttgagtgtggtggtttatgtttgtaattttagtattttggaaggtggaggtgggtggattatttgaggttaggagtttaagattagtttggttaatatggtgaaattttatgtttattaaaaaataaaaaaaaatgagttaggtgtagtggtgggtgtttgtaattttagttatttgggaggttgaggtgggagaattgtttgaatataggaggtggaggttgtagtgagttgagattgtgttattgttttttagttttggtgatagagtgagattttgttttaaaaaaaaaaaaaaaaaaaaaaagaataaggttgggatattgtagtgtttttaaagagaaataaagtagttatggagataagaagtaggatgatttgggtatgtttattagaggtagagataagggagaaattaaagataagtttgggtttttgtttttagtaattgggagtttagtggttatttttgttgtaaagaggaagttgggtaagtgtagtagtgaggttgaagaaaagggaattaaattttggttatgtttatttgaaatgttttttagatattttagtgaaggtattggtatggaggatttagtttgagggtttaggttagtgttttagttgtggatttggggtagatgaatgtagatagattaggttagtgattaggattgagtttagattttattgtgagatatggaagttgagttagaatttgtaaaggagttgagtaggagttgtagggggtaggaggaaaattgggagagtgtagtttttgggagttaaagggagtaagttttaaatgatgttgagggggtgagaatggagaatggaatattggattttatttggtagtatatagattgttgaggattttgttttgggtagttttttggaggaagaggtaagtttggttggagtgggtagaggggagagtgaaggtgaaggattagagtgtatagagattagtgttttggtttgaggggagtagagataggtgataattatagggtagatgtaggttaaaggtgtttagttttttttttaagtaaatgggtagatgtattttatatatgtttttagtgaagggttgggtgtggtggtttaagtttgtagttttagtattttggaaggttgaggtgggtggattatttgagattaggagtttgagattagtttggttaatatggtgaaattttgtttttattaaaaatataaaaattagttgggtatggtggtgggtgtttgtaattttaggtatttaggaggttgaggtagaagaattgtttgaatttaggaggtggaggttgtggtgagttgaaattgtgttattgtattttagtttgggtgataaaagtaagatgtagttttttgttgttgtttttttaattgttaatgaggaaaggggaagttttgtgttaggtgatagagatttaattgttgagtaggtttttttgtttgtggttttttggttggtttttagatgtttaggtggttaatattagagtttgtgtagtagtgtgaggtaatttattgagataggttgggtttgtggagtttggtgagtagtggttttttttttggggtttttttttaatttttgggatatttttttgatttggagtttttttgttttattgttaggtttttttgtagattgtaagtttatttgttattattgttgttgtgtgtttgtttgtttggattgttgtgggttttgggatttgggttgggaatttgtggtggagtgggatatgaatgtggtgagtgtggggttgagggtgtatgggaagggtgaggatgggtaggttatagtgtaggtatttttgagggttgtttgggtgttgtgtgtaaggagtgttttaattgttgattttttggtggtatagagaggttaattttgtgtgggggttgggaggggagtttggattgttggttttgtaagtattttatttgttgtaagtggatttgggtttaggttgatttaggttttgtgtatgtgtattttttgtatttttttgtttttgtttttggttagaggttatttttgtgtgtttgtttggatgttggtatttgtttttgttttttgtggtaggtggggtttgtgagtggagttttggagtgatgaggttatttttgggggtgaagtgtgtgtgtttttgttttggtgtttttgttttaatgagataagagttagattttggtgatttatgttttagttttaatggttgtggtgtggttttggtttgggtgtatgtgtatattgatatgtgtatatgtatgtatgtgattggggtggtggttggtggttatggatgtgtaggattgggggatgggtgggtatggttatgggtgaggtggaggtgtttttttttgaaatgatttggagtagtatgatgagtagtggttattgtagttaagaggatttggatttggagtttgagtagtattttattgtgtgaattttgttagtttgtaggttgtgttgggattaggtgggagttagggggtgttggtgggtgggaggggaagtggttgttggagttttgttttttttggtttgttgttgtgttttgggttggtgggtagttttatttttttggttatgtggttttttgtgggttttggttggggatttgtttgtggaattgtgtgtaagattttgattttattgtttagatgttgggtgttggggtttttttggtttttgttatagataggttgaatatggaaaaagtagttgtatggtttgtggtagatttgagttgggtattatttagttatgattaaagttgattgagtagtttggattagtattttgatttttgtgtttgaatgtttttgttttttttttggggagattaggggaggatgtggagagggaagagtttttgttaggaattgagaagtatgtttaggaaaatttgagaggtagagagagattttgtttttttatttgtatttttgtatggagttagttgagtttttattttttttttgttttggtttgttattagttgttggaatgtggaagattttgttttttttttttagggtggatttggagaaagatttgggaatagataggaaagaagttttgttttggattataagtatttaggagtattttatttataggaagggggaaagttagattataaaatgtttaaagaggtggaaaaagagatttaggttattaatttaggattgtaaggtgttttggaattttttaggtatttttattattggagaattgtgtgttagatgttattggtgtgattattaggtttagagaattaggtttaggtattaggaaaaagaaatagggattgtgaagtttagtatgtttggtagaaatggggtggaaatttttatttaagtaaagaaagtggagttgtgagtgatgttttagataaaattttataaaattttttataaaatgggtggtgtttagtatgttaaaattttagtttagagtttgggtgtaagggttgagttgagtgtagatttttgggtttgtttttatgttagttagttttgagttattttttattgtggaaaggtgggaaaattataagatattaattaattgaaaaggagggttagttatggaggtgtatatttgtaattttagttatttgggagggtgaggtagaaggattatttgaatttgggaggtagaggttgtagtgagttaagattgtgttattgtattttagtttgagtgatagagtgagattttgttttaaaaatagaaaaggaagttaagtatggtggtttatatttttaatgttaatgttttgggaggttaaggtaggtggattatttgtaattaggaatttgaggttagtttggttaatatggtgaaattttatttttattaaatatataaaaattagttgggtatggtggtgtgtgattgtagttttagttatttgggagattgaattattttaattgggaggtaaaggttgtagtgagttaagattgtgttattgtattttaatttgggtgatagggtgaggttttgttttaaaaaaaagaaagaaggttgggtttggtgatttatgtttgtaattttagtattttgggaggttaaggtaggtagattatttgaggttaagagtttgagatttgttaggttaatatagtaaaattttgtttgtattgaaaatataaaaaaattatttggttatggtggtgtgtgtttgtaattttagttattggggaggttgaggtaggagtattatttgaatttagaagatagaggttgtagtgagttgagattgggttattgtattttagtttggatgagagagtaagattttgttttaaaaaaaaaaaaaaaaaaaaagaaagaataggaggttgagaagttttaagttatatgttaaaaaaaaagaaaaaaatattagttttaggttaggtgtagtggtttatatttttaattttagtattttggaaagttgaggtgggtggattatgaggttaggagtttaagattagtttggttaaaatggtgaaattttgttttgattaaaaatataaaaaattagttagttgtggtggtaggtatttgtaattttagttatttgggaggttgaagtagagaattgtttgaatttaggaggtagagattgtaatgagttaagattgtattattgtattttagtttggaaaatagagtgagattttgttttaaaaaaaaaattattagtttttatggatagtggtagagtggagggtgggtttttatggtgtagaagggaaattttatggttttgttgtgtatttgattgggatggttgttgaaatttttttttagtaggtagttttggaaatagaaaaagaaatttttttttttttagaattttggaagggttgtgtagtgtttttaatttaagtttgttttttgagtgaagatagggaggtttattattagaagggaaggggttggaaatgaggttattgtattttagtttagggtttttgggttatttaggaagggaagaaggagtaagtttttttattgttaggtaggagtttagagttattataagaataagttagtattatttttgtgttttttttgttttgtaaataaaatgatttttttttttgttttggtattagagtttgtttggtattttttttgtttttagtattttttttatttgggtatttttttttgttggtgtattgaataaatatatttattgttttatttatagtttttagtttttattttttagggtttatattatttgtttttattaatttgataaggttgtttattgtttttagtaaggtttgtattggggtttttattttagtgtttttttttatttaggagatttttggatatttggggaagaaaatgagtttaaatttttatttttttttttttattttttttttgtaaggttttggttttagtttttagttttatatttttgttggttgtagaatagtagtgggttttgggtaaggagtattttgttaaaatgttttattttgtttttttatttgttttttttatttgtttttattagatggtttaagtgtttaaggggattttagggtggagttagggagaattttggtttttttgggttaggtataagattattttataggaaattttgtgggaatttttttgggataaagtattggttagtgttgagtttagttgtgtttgtgatatttgtattttaattagggtttatttgatgttaataggaagtaaggttgatgtagtggggttaagggagtttgggagaagaaagttggtttagagttttggttgttttgttttatattttatttttttggtaagaatttagtttttagatgaggtggggagtgagtggttgagttaaaaatttttgggttgggtatgatggtttatgtttgtaattttagtattttgggaggtgaaggtaggtggattatttgaggttaggagtttaagattaatttggttaatgtggtgaaattttatttttattaaaaatataaaaattagttgggtgttgttgtggtatgtgtttgtagttttagttatttgggagtttgaggtaggagaattgtttgaatttaggaggtagaatttgtagtgagttaagatttagttattgtattatagtttgggtgatagagtgaggttttgttttaaaaaaaaaaaaaatttttgggttaaatttttagatagtataggtaggtgtagaaatttattaggaagttgtttgtgtatttttggtagattggagtttggtttaaagttgttttttatgtagtttgggttaaggttaaatattatgttatagtgattttttttattatgtgtgagatatggagaattggttttaagtattattttgtttattggtggttggattattgatgtgtattattttttattttttttattttgtagtgggttatggttttgtgttggggtagaggagaaaaatgggttgttttttttaggataaatttttattttaatttaattagggtgttgtgattagaatgtgtaattgaggtgtgattttattgattttttttttttttgagattgagttttgtttttgttgtttaggttggagtgtgatggtatgattttagtttattgtaatttttattttttgagtttgagtaatttttttgttttagttttttaagtagttgggattataggtatgtgttattatgtttggttaattttgtatttttagtagagatggggtttttttatgttggttaggttggttttaaatttttgattttaggtgatttatttgttttggttttttaaagtgttagaattataggtgtgagttaatgtgtttagtttgtttttgttttttgtgttttgaagtagggttttatttagttttttaggttggagtgtagtgatatgataatagtttattgtagttgtaattttttgggtttaaatgatttttttattttagttttttgaatagttgggattataggtatattattatatttggttaatttttttttttttttttttagtagagatgaggttttgttatgttgtttaagttggttttaaatttttgaggattaagtgatttttttattttagttttttaaaatgttgggattgtagatgtgagttattatatttagtttgattttattttaaatgagagtttttttttagagttttttagttgtttttggtttttggttatgtgtttttagttgtttttgtttttgtggtatttttaaggttatatttagtgttgaggttttaggtaggtagtagagagaagttaaatgattttgttttttttttatttatttagagtatgtaaaattaggagtagtggtgggtttagggtgggtattagttatgtatatgtatattagggatagggggttaaaggtagttagtttttaaagattgttttagaggttattttttagagaagttttgggttttttaagggttttgtgtttatgttggtttattttgtagg

SEQ ID NO: 285 - DNA, 10224 bp, Artificial Sequence
  chemically treated genomic DNA (Homo sapiens)
tttgtaagatgggttagtatggatatagggtttttgaggaatttagggtttttttgaaaaatggtttttggggtagtttttggaaattgattgtttttggttttttgtttttgatgtatatatatatagttggtgtttattttgaatttattattgtttttggttttgtatgttttgggtggataagggaaagatagaattatttggtttttttttgttgtttgtttagggttttagtattgaatgtagttttaaggatattatagaagtaggggtaattgaaggtatatggttaggggttaggaatagttgagggattttgaagagggatttttatttaaagtaaaattaggttgggtgtggtggtttatatttgtaattttagtattttgggaggttaaggtaggaggattatttgatttttaggagtttgagattagtttgggtaatatagtaagattttatttttattaaaaaaagaaaaaaaaaaattagttaggtgtggtggtgtgtttgtagttttaattgtttaggaggttgaggtgggaggattgtttgagtttgggagattgtagttatagtaagttattattgtgttattgtattttagtttggggaattgagtgagattttgttttaaaatataaaaaataaaaataggttgggtatgttggtttatgtttgtaattttagtattttgggaggttgaggtgggtggattatttgaggttaggagtttgagattagtttgattaatatggagaaattttgtttttattaaaaatataaaattagttaggtgtggtggtatatgtttgtaattttagttatttaggaggttgaggtaggagaattgtttaaatttgggaggtggaggttgtagtgaattgagattgtgttattgtattttagtttgggtaataagagtgaaatttggttttaaaaaaaaaaaaaattagtaaaattatattttaattgtatattttgattatagtattttagttgagttggagtgagggtttgttttggagaaggtagtttattttttttttttgttttggtatggggttatgatttattgtagggtgagaggagtggagagtggtgtatattagtagtttagttattagtggatagagtagtatttggagttagttttttatgttttatatatagtgagaaaaattattgtgatatgatgtttaattttgatttaagttgtataaaaggtagttttaggttaggttttaatttgttagaggtatataggtagttttttggtgggtttttgtatttgtttgtgttgtttggagatttggtttaaagattttttttttttttgagatgaagttttattttgttgtttaggttgtagtgtagtggttggattttggtttattgtaagttttgttttttgggtttaagtgatttttttgttttagatttttgagtagttgggattataggtgtgtgttataataatatttggttaatttttgtatttttagtagagatgggattttattatattggttaggttggttttgaatttttgattttaagtgatttgtttgtttttattttttaaagtgttgggattataggtgtgaattattgtatttgatttagagatttttaatttgattatttattttttattttatttagggattggatttttgttggaagggtggagtgtgggatagggtagttagggttttgaattgattttttttttttagatttttttggttttattgtattagttttattttttgttgatgttagataggttttagttagaatgtgagtgttatagatatagttaagtttagtgttgattaatattttgttttagaagaatttttataaggttttttgtagaatgattttgtgtttagtttaggagagttagggttttttttgattttgttttggagtttttttaagtatttaaattatttgatggggataaatggagaggatagatgagggagtagggtggagtgttttagtagaatgttttttatttagaatttgttgttattttgtagttagtaaggatgtggggttaagaattaaggttagggttttataggaaaaaggtaaagggggaggggtgggaatttaagtttatttttttttttaagtatttaaaggttttttggatggagaagagtattggagtaaaaattttagtataaattttattggggatagtgggtaattttgttgggttagtaaaaataaatggtgtgggttttggaaaatgagggttggaggttgtgaataaagtagtggatgtgtttgtttagtatattaatgggaagaagtatttagatgggaggagtattaggggtaggagaaatgttagatagattttagtgttagggtaagaaggaagattattttgtttgtagaatagggagggtatagggatggtgttaatttgtttttgtgatggttttgagtttttatttaataatgagaaagtttgtttttttttttttttttggatgatttaggagttttgggttgggatgtagtgattttatttttagtttttttttttttggtgatgaatttttttatttttatttagaaaatagatttggattagaggtattgtatagtttttttaggattttaaaggaggaagagtttttttttttgtttttaaagttgtttgttggaagaggattttaatagttattttagttggatgtatagtaggattatggaattttttttttgtattatagggatttattttttattttattattgtttataaaaattgatggttttttttttgagatagagttttgttttgttttttaggttggagtgtagtggtgtgattttggtttattgtaatttttgttttttgggtttaagtaattttttgttttagttttttaagtagttgggattataggtgtttgttattataattggttaattttttgtatttttagttgagatggggttttattattttggttaggttggttttgaatttttgattttatgatttatttattttggttttttaaagtgttgggattaaaggtgtgagttattgtatttggtttaaaattgatgtttttttttttttttttaatatataatttgggattttttagttttttattttttttttttttttttttttttttttgagatagagttttgtttttttatttaggttggaatgtagtggtttagttttgatttattgtaatttttgttttttgggtttaagtgatatttttgttttagtttttttagtagttgggattataggtatatattattatggttagataatttttttgtatttttagtatagatggggttttgttatgttggtttggtaggttttgaatttttggttttaagtgatttgtttgttttggttttttaaaatgttgagattataggtatgagttattaagtttagtttttttttttttttttgagatagagttttattttgttatttaggttggagtgtagtggtatgattttggtttattgtaatttttgttttttggttgaagtgatttagttttttaagtagttgggattatagttatatattattatgtttggttaatttttgtatgtttagtagagatagggttttattatgttggttaggttgattttgaatttttgattgtaaatgatttatttgttttggttttttaaagtattggtattagaggtgtgagttattgtatttggtttttttttttatttttgagatagagttttattttgttatttaggttggagtgtagtggtatgattttggtttattgtaatttttgttttttaggtttaagtgatttttttgttttatttttttaagtagttgggattataggtgtgtatttttgtggttagtttttttttttaattggttagtgttttgtggtttttttatttttttatagtggaaaatggtttaggattgattgatatgaagataagtttaggggtttatatttaatttaatttttgtatttaagttttgggttaagattttggtgtgttgagtattatttattttgtaaggaattttgtaaaattttatttgaagtattatttataattttattttttttatttaaataaggatttttgttttatttttgttaggtatattgagttttatagtttttgttttttttttttggtgtttaggtttggttttttgagtttggtggttatattaatggtatttggtatatagttttttgataatggggatatttaggaggttttgagatattttatagttttgggttagtaatttggatttttttttttatttttttaggtattttataatttagttttttttttttttgtgggtaaagtgtttttgaatgtttatggtttaaaataagattttttttttatttatttttaaatttttttttagatttattttagaggaagggaatagaattttttatattttagtagttggtgataggttagaatagggaagaggtgagggtttagttggttttatataggagtgtagatggaggagtaggatttttttttgttttttaagtttttttaaatatattttttaatttttggtgaggatttttttttttttatatttttttttagtttttttaaggagggagtaggagtatttgaatgtggaaattgaggtgttagtttaaattgtttggttggttttagttatagttggataatgtttggtttaggtttattataagttatatagttgttttttttgtgtttaatttgtttgtgatagaaattaagggggttttggtatttagtatttaggtggtggaattggggttttatgtatggttttgtgggtaggtttttggttaggatttgtggggagttatgtagttaggagggtggggttgtttattgatttaggatgtggtaatggattggggagggtggagttttagtgattgtttttttttttgtttgttggtattttttggtttttatttggttttggtgtggtttgtgagttagtgaggtttgtgtggtgaagtattgtttgagttttgagtttgagtttttttggttgtagtagttattgtttgttgtgttgttttaggttattttgaaagaaggtgtttttgttttgtttatagttgtatttgtttgttttttagttttgtgtgtttgtagttgttaattattgttttggttgtgtgtgtgtgtgtatgtgtgttagtgtgtgtgtgtgtttgggttagagttgtgttgtaattgttaagattgaaatgtagattgttgggatttagtttttgttttattggggtaggaatgttggggtggggatatgtatgttttgtttttaggaatgattttattgttttggagttttatttatagattttatttattatagggaatgggggtgggtgttagtgtttgggtaagtgtataagagtggtttttggttggaggtgagggtgggaaggtgtgggaagtgtgtgtgtgtggagtttgggttagtttgggtttgggtttgtttgtagtgggtggagtatttgtggagttggtaatttaggttttttttttagtttttgtgtagaattagtttttttgtgttgttgggaaattggtaattagaatgttttttgtgtgtggtatttaggtagtttttgagaatgtttgtattgtggtttgtttatttttgttttttttatatgtttttggttttgtgtttattatgtttgtgttttgttttattgtgggtttttagtttaggttttggggtttgtaatagtttaggtagatgagtgtgtggtagtggtagtggtaggtgaatttgtaatttgtagagaggtttggtggtgaggtggaggagttttaggttggggaaatgttttggagattgaagggaagttttagggagagggttgttgtttgttaggttttgtaggtttgatttattttagtgggttattttatattgttatgtggattttaatgttggttatttgggtgtttggaaattggttggaaggttataggtagagaggtttgtttaatagttggatttttattgtttagtatagaattttttttttttttattggtaattaaaaaaataataataaaaaattgtgttttgtttttgttatttaggttggagtgtaatggtgtgattttggtttattgtaatttttgttttttgggtttaagtgatttttttgttttagttttttgagtatttaggattataggtgtttgttattatgtttagttaatttttgtatttttagtagagatggggttttattatgttagttaggttggttttaaatttttgattttaggtgatttatttgttttggttttttaaagtgttgggattataggtttgagttattgtatttggttttttattgggaatgtatatggaatatatttgtttatttatttgaaggaaaaattaaatatttttaatttatgtttgttttgtggttgttatttgtttttattttttttagattaagatattggtttttatatattttaattttttgtttttatttttttttttatttattttagttaggtttgtttttttttttaggaaattgtttgggatagggtttttagtgatttgtgtattattaaatggaatttagtgttttattttttatttttatttttttagtattatttgaagtttgttttttttgatttttaggggttatatttttttagttttttttttattttttgtagtttttgtttagtttttttgtagattttgatttaatttttatattttatgatgaagtttgggtttagttttgattattggtttggtttgtttatatttatttgttttagatttatggttgaaatattgatttaaatttttagattagattttttgtgttagtatttttattaggatgtttaaaagatgttttaagtgaatatggttaaaatttaatttttttttttttagttttattgttatatttgtttagttttttttttgtagtaaaaatggttattaggtttttagttattggagataaaagtttaaatttatttttgattttttttttgtttttatttttgataaatatgtttaaattattttgttttttatttttatggttattttatttttttttgagaatgttgtaatgttttagttttgttttttttttttttttttttttttttgagatagagttttattttgttgttaaggttggagggtagtggtatgattttggtttattgtaatttttgttttttgtgtttaagtaatttttttattttagttttttgagtagttgggattataggtatttgttattatgtttggtttatttttttttattttttagtagatatgaggttttattatgttggttaggttggttttgaatttttgattttaggtgatttatttgtttttgttttttgaagtgttgggattataggtatgagttattgtgtttggttttttgtttattttttgtattttgttataattttgtgttttttttagttgaatttgtgatgtttttttgtattggatgagagggtttttatgtatatatagatttgggatattatttatttataagtttttaaataggttagagtagtgatgtttaatttagattttatgttataataatttggggagtttttaaaatttattgatgtttagggtttatttttagtagttgatttaataggtttgtggtgggatttaggttagtggggaggattgtaaaagtatttttggtgattttagttggtgtttatttaggggagagtaatttttgtttgttggtgatttttaggggtgtagaaggattgttgggtgtgtggttgtgtgtatattttagtatttgatttattgggttagaaaagggtgtttgttaaataaagatttaataaaatttttgtttgtagggggtttattaaaggttttaaatttttttaggtttttttttataggtggtaatttttttttattttaaaggttttggagggggttatgagtgtttgagaagaggtaagtttgggaagatggattttgaggatagtaggtataaatttttttttaagaagggttaaggtattttaaagataagaaatttaaaattagtgtatttttatatataagtagttatttttgtttatttgtggtttagatatgagtggagtgtgataagggataaattatttttgtgtattttttagtgatggggtgaaagtaatggatttagtttttgggagttgtttttgttgattttttttgttgtgatttgatttgtggtgattgtgttgttttttggttgttttttttgtttttgtaggtgtgtggggttattatttatgtgtgtattgtaggtttttgtgtatgatgttttagatgaagttgttatagaggttgtattatgtgtgtgtggtgggttttgtgggttggaagtggtggttatggttagggattagttgttgtgtggggttgtatgtggtgttttgtgtgatgtgtagtgtgttggtatgttttagttgggtgtggttttttttagtgtgtttagtgggtgttagtttttgtagtttaatgagtttaggtttttttgatatggtttggttgggtttgtgttttgttggttttgggtgttagtaagtgtgggttgggtggggttatagggtgggttttgattttagtgttttttttaggatttagattgggtggtgggaaggagttgaggagagttgtgtaatggaaatttgggtgtagggattgtggggtttgaaggtggggttgggtgtgtttttgtagagttttttttgttttgttttttttttttttttttgttttttttttatattttattttggatggttataatgatggtgattgtaaagtattatgtggagatatttgtgtttttggaggttagttttattgtgttagaggaagagggtttttatatttggttttggtttttttggtttggtttgttgaagtaatatatttggtttatttattgggtggggtaggaagttttgagtttttatttggggtgaggaggagggagattggttagtagttttattgtttgttttgttttttattgtggagattggggttttggtagaggttggattgtgattttgaggtttaggggtgtattttgggtggatttttttggtatgggtggttggtttttagtaattgtagtttttatttggttttgttattttgggttgttaggatataagtttttttatgttttttttagtgtttgatttggtattttttgtaggtaggtgggtattgaggatggtaatgtatgtgggggatgtgggagtagggtttagaggtttaaggttttaggatatttttatttgtagtaatattatttattttggtattgtgagtagtgtttagaagtttttgtattgtagtaagtatagtggggttgttttggagttattgtttttagtatatttagtttgtaggttttagtttatttgggggaaagttaggaaggtttgattggttttggaaggtgggggtattttatttatatttatgttttttgtattttttttattttttttgttatttttataggttttatttttgtgtttgtagttgtaggttttgttttgaggggttgaatatatgttggagttggtgtttggtaattgtttgttatttgtttttgtttttttgttttagttgtttttagatttttgggatttaggagagagaagtggagagtggtaggaaggtgttggtaaagtgggatagtggttttgagtagttaattttttagtgtttatttgttttaatattaggttttttttaggaggttgggttttagttagggttagatgggttaggaaattttgtaagtgggttaggttgggtagttggtttagtagtgtgtttgtgaggaaggtttgaagttgtaagggtgtttagtggaggttagtgtgatgtaggtgttggttagggggttaaggaaaaggaaggggttgggttgggttgagaatgtttgtgggggtttatgttttattagttggtgtgttatttgaggtttaaggattgaaaagagtattggggttgaggtgggtgggtaaagataaatagtagggatgtagttggggtaggatggggagggtggtattggggttgtgggggtt

SEQ ID NO: 286 - DNA, 2501 bp, Artificial Sequence
  chemically treated genomic DNA (Homo sapiens)
aatgtgtgtgtttatattaaataattgattgtttgtaaattaaaagtagaattttttttaaaagtttgtattgtgttattaaaaaataatttataaaattaaagtgattttaaatatattttattatttaaaataagattgtaggtaagtagggtggtttttttaaaagttgttttatgtatttgattaagtaatttttgatgatttttttataatagttttttatatttggttagtttgtatgagtaagatgatttgtgatagaatattgtgaatattgttttaaaatatataaaaatgtttgttttttatttttttttattgatgtggtttaaaagtttgatttaaataatgtgtgtgtgtaataagtttatgggttggaaaggtaaagtggatgttttttttgttttattatttgtagtatttattttaagggtaaaatgataatagttattattagtaaggatgaataaagtaagaatgagtatttttttttttttgtttgtatagattttaatttttttttttttttttgttttagttatattaggttattataattatgtgatatttatgggaaggaggagggaaagtagggagattagggggggaaatatgttgtatgaaaaaattaagtggatttatgttagtttttgtattttttttttaagaatttttaaattatttttgaatagttgtgtttaagataaaatatgttgatttagttagtggagatataaaattaatgatttttgtgatgtttttagaggggtagtatttgtatgtatttattggtttagttataagtgatatattgttttttgagtaaatatttgtgtttttttattgtttagaataagaaattttttttttgtagataatgttaaaggtgatttttttgaaagtttgtagaatattagaatttgaatgatttatggttttatattatttgatttaggaggtatatttttgttttttattgtgtttgtgtttgttttttagtagtagatttataaatattgtttatatttattttatatatagatgataggtagagtgtgtattagggaaatttggtagtgttattgagtttttatatatatatatattgtttttttgttattttgagtttggatatggaaattggagtgttgttgtgtttagtttttattttaaaattttgtgtgggaaaattaatgtgtaatttaagaaaaatagaaaaaatgtattttttatttaagaaaaataagtatagatgaatgaaaatatttatatggaatttggaattttttaaaatatttaatattttggaatgttttaaaatatttaatttaaaatatttaaagttagatgtgttttagttatgtatttattgtagtaaatttatattagttttttaagatgagagattgttgttttttgaaagatgtgatgttgtattgtttttttttgtgttttttagaaaaaagtatgatatttttattatttttttttttatttgataagatttgtttttttttatattttttttgttttatatgaggtataatttttggagtttgtaattgttaggagatgaagtgatgatggggagtgattatagttaatagttttgattaataataaggtagaaaattagtaatgttagtatttagttattttgtttttttttttttttatatgtttttttagtttgtgttggtggttttatagagggtagttggagttttttgttagttttgaagtgtagtaaaggtgtaggtagggtagagaattagggaaattaaggagaaaaagtagaaattgtaaaaattatgatgttgagatttttgtagggtttagtgtgttgtaggaggggtaaggatgaagtgtgttgtgtgttgtttttgtgtgtttttttgttatatgtggatttatttgtgtttggatatgttgtgattgaaatggtaattattgttattattgtgattttattagtagttttggtgttgtttttgatagattttgaagatgtagagagggggaatgattatgggatgttaatttttatttttgataatgatgataatttgttgggttatataggtagagtgttttttttttaaatattaatttttttttgaaatgtttttatttttattaattattaattatttgtataaaattaattgaattatttttgtttttagttaataattataattttttattttttaaattttattttgtttatattagattatattgttaaagtaaatatttttaagaatagaaatgtatatggaaattgtaattatttttattgttttattatgtttaatataaaagaatgtttattaatttgaaattttgatattgttagtatttttagaatgatatttttttagaaatttaatatttgattaagtttttattataaaggaaaaaaatattatttgtaagtaatttggatttaaatttatttgtatttttttttttttatatttgtagttttaaaaata

SEQ ID NO: 287 - DNA, 2501 bp, Artificial Sequence
  chemically treated genomic DNA (Homo sapiens)
tgtttttaagattataagtgtaaaaaaaaaaaagtatagataaatttgaatttaaattatttgtaggtagtgttttttttttttatgataaaaatttagttaaatattaaatttttaagaaaatattattttaaaaatattagtagtattaaagttttagattgataagtatttttttgtattaaatatagtaaaataataagaatgattatagtttttatgtatatttttgtttttaaaagtgtttattttagtaatatgatttgatatgaatagaatgaagtttgaaaaatgagaaattgtggttgttagttggaagtagggatgatttgattaattttatataggtggttgatggttgatggaggtggaggtattttaggaggaagttagtatttgggaaagagatattttatttgtatagtttagtgaattgttattgttattagaggtggggattggtgttttgtggttgttttttttttttatatttttagggtttgttggaaataatattagagttgttgatggggttatagtagtaatagtagttgttattttgattatagtatgtttagatataagtaaatttatatgtgatagaaaaatatataaggataatatatagtatgttttatttttgttttttttgtggtatattaagttttgtgaaggttttagtattatggtttttatagtttttattttttttttttaatttttttaattttttgttttgtttgtatttttgttatattttaaagttggtgaagggttttgattgttttttgtgaggttgttagtatggattgagagagtatatggaggagggagagggtagggtggttgaatgttagtattgttaattttttattttattgttaattaaagttattgattgtgattattttttattattgttttattttttggtaattatagattttagagattgtattttatatgaggtagggaggatgtggggaaaaataggttttgttaaataagagggaggatgataaaaatgttatatttttttttgagaaatatggaagaaaatggtgtaatattatgttttttagaaggtaataattttttattttaaaggattgatataaatttattgtaatgaatgtatgattgaaatatatttaattttggatattttgggttggatattttaaaatattttaaagtattggatattttaaaagattttaaattttgtataagtatttttatttatttatgtttattttttttaaataaaaaatgtattttttttgttttttttaaattgtatattaatttttttatgtagaattttagagtggaggttaagtataataatattttagtttttatatttagatttagagtagtagaggagtagtatgtgtgtatatagaagtttaatgatattattaaatttttttggtgtatattttatttgttatttatatgtaagataagtatgagtagtgtttataggtttgttattgagaagtagatatagatataataaaaaataagagtgtattttttaaattgaataatgtagagttataggttatttaagttttgatgttttgtgggtttttaagagaattatttttaatattatttatagaggaaggattttttgttttgagtagtgaagaagtgtagatgtttatttggggaatagtgtgttatttatggttgagttagtgagtatatgtaggtattgtttttttagaaatattatagaggttattaattttgtgtttttattagttaggttaatatattttgttttagatatagttatttagggatgatttggaaatttttaaaaaaggaatataaagattaatatgagtttatttggtttttttatgtggtatatttttttttttaatttttttgttttttttttttttttttataagtgttgtgtaattataataatttgatgtggttaaaatgaaaaaaaaaaaaaaagttaagatttgtgtagataaaagagaaaagatatttatttttgttttatttatttttgttagtgatggttgttgttattttatttttaaaatagatgttgtaagtgataaggtagaaaaagtgtttattttatttttttggtttgtgaatttattatatgtatatgttgtttaggttaaatttttaagttatattagtgagaaagaatggggagtaggtatttttgtgtgttttgaggtagtgtttataatgttttgttataagttattttgtttatgtaaattaattaaatataagaggttgttgtaggaagattattagaaattgtttggttaaatgtatgaaatggtttttaagaaaattattttgtttatttataattttgttttaaatgatagaatgtgtttagaattattttaattttatgaattattttttagtaatataatgtagatttttaagggaagttttatttttaatttataagtaattagttatttaatgtggatgtatatatt

SEQ ID NO: 288 - DNA, 3501 bp, Artificial Sequence
  chemically treated genomic DNA (Homo sapiens)
ggtttatttttgtaattttagtattttgggaggttgaggtaggtggattatttgaggttaggagattgagattagtttggttaatatggtgaaattttgtttttattaaaaatataagaaaattagttaggttggtggtatgtatttgtaattgtagttatttgggaggtttaggtaggagaattgtttgaatttgggaggtggaggttgtagtgagttgagattgtgttattgaattttagtttgggtgatagagtgagaatttgttttaaaaaaaaaaaaaaagttaatatttgttgagtttgttttatgggttattttatagtaattataaaaggaaggtattgttttttagtttttttgtttataaatgaggatataaaggtaagtaagattaagagttttggttaaggtaggttgggagttaaatttaggttgtttgagtttaaaattgtaaatttttttttttttttgggtggggggattgagttttgttttgttgtttaggttggagtgtagtggtgtgattttggtttattgtaagttttgttttttgggtttatgttatttttttattttagttttttgagtagttggtattataggtgtttgttattatttttggttaattttttgtatttttagtagagatggggttttattgtgatagttaggatggttttgattttttgattttgtgatatgtttgttttggttttttagagtgttgggattataggtgtgagttattgtgtttggttaaaattgttatttttatttttgtgttagtttttagtttaagttttttatgatataagagggaaattgaggtttagggaggtataatggtttttttaaggttgtatagttagttagggatataatttaagttttttggtgataggtttagggttgtttggattttggagtgtggtgggggtattttggtggtttttttttagttaatttttgtggttggtttggtttaggtttagttgggtgagttgatgatttaatgggtaagtattgtattttgtgattttggtttgttttgttgttttagagggtttttagtttttgggttggatgggtggtaatttgtttgagtgaaattgggaaagttttgttttttggtgtttagtgggtggtgggggtgttttttagttagttagtgagttgtggtgtttgttaggtttggtgggtggtgggaaatttgttgtgtgtgttttgttgtttatttttttattggttagttaggtttttggggtggtattttggggtagtttttttttgtgattgggtggtattggttttgggttttgtttttagtttagggttgtgaaggtgggatggagtaaggtggttgtaggttttggtgtgttgttggttgtagagagtttaggtagtgggtttggtaggtatagtttttagtggttttttttatttagtttgtttttttttttttttagtttgtttttttttgtttttatttttgaattttgtgggatgtgatttttttttaagatttaggtttttttggtggtgttatattttttttttagattgtatttttttttgttgagatttgagtttttgatgaaattgtgatttgtttgtaaattgggtgtttagtgttgtttattattgtggtgttgtttttagattttatgttggagattttattattttttgttttgttttattagagtttgttagttttttgtgttgtggtttttatttatttttttttagtttggtagaggagttatggtgttttttgtgggtttatttgatttttttggttttgtttagtttgattggggttgttgtgatggagagagttggattttggttttatttggatttaaagttttgtgtgtgggttattgagttatttagggagtttagggttttaatttagaggtttaaagttagggtttttaagttagattttagttttatttttagtttattgttaagaattggaagagagataggaggagtgttataggggaattttattgagaggaaatatggttatatttagtagatatgtttttttttaattttggttttgtattggtgtgtgtgtatatatatatatatatatatatatatatatatatttatttttagtttttgttattgtttagtttttagttataaggtgggatattttttaatttttatgattagaggtagtaggggtaggagggaggtaagaggaggggagaagtagtttggttttggggttgggaggaagtgggtgtggagagtaggggtgggggtatgattagtggttaggtgtgtttaatagttgtaagaagagtgggatttttagttttaggtggttttagttttgttagtttttttttatggagttttttggagtaagaatagtgtttaggggagaagggtggggttttttattttatattagtttttttggtagggtgggggattggagggggtagggtggggtggtggtgggtaatatttagttttggggtttttggggagttttgttttttttttttttggtgttgttggttgtttatagtgttaggttgttttgtagtagttgtatgatgagggtgttgtttttgtaggagtttttgttgagggtgtgtagattagttatggttttgttgaaagtggttttggttagagagatggtttttttggggttgttggtgattttgtagtggaagatggaaaagtttagggttaggtttaggtggatggggttggtgggtggtattttttttttgttgatgtttatggttttttggtaggttgattgggttgagttaatgatgtgttttttgttgttattggtggttattttggttaggtagtggtagtagttattttttatttttaggtagaagatttggtttttggtgtttttggtttttttgatgaggtggttgtttagtaggtttagtatggtgttgtatatgttttggagtttagtttttatttttttttggtatttatgtattttgggtttttttttttttgagttttttttgttgtttttttgtttaatattggatagtattttttaggtagttttttggttgtttattatgtttttataggttattgagagtaggttttgttttttgtaggagagttttttgtttttttttatggtgttttttatgaaggttgttatgtttttatagtgtttggtttgttttgttagtttggttttttggattagattggttttttttatggttttggggatatataggtgggtggtgggttaattgttgtttgggattaatgttggattttgtgttttttttgtttttggtttgttttttggttgggtggttaggtttagagaagggtggggaggagtagggggtgggattagggtttaagatttgtttttttttttttttttttttatattttttttggttttgtagtaaaggtaaaaaggttgggatgtgggggtgaattattagaatagttagtaggagaaat

SEQ ID NO: 289 - DNA, 3501 bp, Artificial Sequence
  chemically treated genomic DNA (Homo sapiens)
attttttttgttgattgttttgatgatttatttttatattttagtttttttatttttattgtagagttggaaagggtgtggggaagagaggagagggaggtaggttttgggttttggttttgttttttgtttttttttatttttttttgggtttggttatttagttaaaaggtaggttaagagtaggagagatatagagtttggtattggttttaggtagtagttagtttgttgtttgtttgtgtgtttttagagttatggagagagttagtttgatttagaaggttaagttggtagagtaggttgaatgttatgaggatatggtagtttttatgaaaggtgttgtggagaagggtgaggagtttttttgtgaagagtgaaatttgtttttagtagtttataagaatgtggtgggtggttagagggttgtttggagggtgttgtttagtattgagtagaaaagtaatgaggagggtttggaggagaaggggtttgaggtgtgtgagtattgggagaaggtggagattgagttttagggtgtgtgtgatattgtgttgggtttgttggatagttattttattaaggaggttggggatgttgagagttgggttttttatttgaagatgaagggtgattattattgttatttggttgaggtggttattggtgatgataagaagtgtattattgatttagtttggttagtttattaggaggttatggatattagtaagaaggagatgttgtttattaattttatttgtttgggtttggttttgaatttttttgttttttattatgagattgttaatagttttgaggaggttatttttttggttaagattatttttgatgaggttatggttgatttgtatatttttagtgaggatttttataaagatagtatttttattatgtagttgttgtgagataatttgatattgtggatggttgataatgttggggaagaggggggtgaggttttttaggagttttagagttgagtgttgtttgttattgttttgttttgttttttttagttttttattttgttgagaggattagtatggggtgggaggttttattttttttttttaggtgttgtttttgttttaaagggttttgtggagagggattggtagagttgaggttatttggggttggggattttattttttttgtagttgttgagtgtatttaattattggttatgtttttatttttgttttttgtatttgtttttttttgattttaggattaggttattttttttttttttttgttttttttttgtttttgttgtttttgattgtaggaattgaggagtgttttgttttgtggttgagaattggatagtggtaggggttggagatgggtgtgtgtgtgtgtgtgtgtgtgtgtgtgtgtgtgtgtgtgtgttagtgtaagattgagattgagggaaagtatgtttgttgggtgtgattatgtttttttttaataaagtttttttgtgatattttttttgttttttttttagtttttggtgatgggttgggagtgggattggaatttgatttagagattttgattttggatttttgagttagggttttgaattttttaggtggtttagtggtttgtatgtaagattttgagtttaggtgaggttggggtttggttttttttattatggtggttttagttaaattggatgggattgggagggttgggtgaatttataggaggtgttgtggtttttttgttgggttgaggggaggtgagtgggagttatggtgtgggaggttgatgagttttggtggagtggggtaggaaatagtgaagtttttggtgtgagatttaaggatagtgttgtagtagtgagtggtattgagtatttgatttgtaggtgggttatagttttattaagggtttagattttagtggaggggagtatgatttgaggaaggggtatagtgttgttaaaaaagtttagattttaggagagggttatgttttatagagtttggagatggagataaaaggaaatgggttgaaggggaggaaggatgagttgggtgggaagggttgttgggagttgtgtttattgagtttgttgtttgagttttttgtagttagtaatatgttggaatttgtagttgttttgttttgttttgtttttgtagttttggattggaggtggggtttgaggttaatattgtttaattataggagggagttgttttagggtattgttttgggggtttgattggttaatgggaaagtgagtggtggaatgtgtgtggtgagttttttgttgtttgttaggtttggtggatattatgatttgttgattgattgagaggtgtttttgttgtttgttgagtgttgaggggtggagtttttttggttttatttagataagttgttgtttgtttggtttgagagttgggaattttttagagtagtgggatgagttaggattgtaaaatgtagtgtttgtttgttgagttattagtttatttggttgggtttgggttgggttggttgtgggggttggttggaaaaaggttgttaagatgtttttattatattttgaaatttaagtagttttggatttgttgttgagaggtttggattgtgtttttggttggttgtgtgattttggaaaagttgttatatttttttgggttttagttttttttttgtattataaggggtttggattaaaggttaatataagagtgaaaatggtggttttggttgggtgtggtggtttatgtttgtaattttagtattttgggaggttgaggtgggtgtattatgaggttaggagattgaggttattttggttattataatgaaattttgtttttattaaaaatataaaaaattagttgggagtgatggtgggtatttgtagtattagttatttgggaggttgaggtaggagaatggtatgagtttaggaggtggagtttgtagtgagttgagattatgttattgtattttagtttgggtgatagagtgagatttggtttttttatttaagaaaaagagaaaatttgtgattttggatttagatagtttgggtttgatttttagtttgttttggttaaggtttttaattttgtttatttttgtgtttttatttataaataggggaattgaaaaatagtattttttttttatagttgttgtaaagtaatttataggatagatttaataaatgttagttttttttttttttttaagatagatttttgttttgttgtttaggttggagtttagtggtatgattttggtttattgtaatttttattttttgggtttaagtaatttttttgtttgagttttttaagtagttgtgattataggtgtatgttattagtttggttagtttttttatatttttagtagagatggggttttattatattaattaggttggttttaattttttgattttaggtgatttgtttgttttggttttttaaagtgttgggattataggagtgagtt

SEQ ID NO: 290 - DNA, 2501 bp, Artificial Sequence
  chemically treated genomic DNA (Homo sapiens)
agatattgggaagagtttttgaaatttagaggaatgtatgtgtatgggtagtttggggtaggtagaagatgttaaggtgtttagagataaaggggttagtatgtgtaagggtatttggtatgagtagatagtggtgggattgtgggtatgtgaggagaggagaggttgtatggggttaagtgttaggttaggaggagagtttaggtgttttgttaaaaatgatagttagttgggtatggtggtatgtatttgtagttttggttatttaggaggttgaggttggaggattgtttgagtttaggggtttgaggttgtagtgaattatgattatattattgtatattagttagagtaatagatgagattttgttttaaaaaaagtgagagtttgtttttatgattagtttggattttttaggtttttggagttagaggtagggaggataaggtaggaggtgtgttgtagataagatgtaattagagataagtttggtggggtagtgaggttggaaagtggttgtttggtgatttttaaggataggatttagggtttttttggtatttgtttattgttttgtaaattttttttttttaaggttagaaaggattgtttgtaaagtgtatttaggaagtagttttagatttttgtttttttaaatagtttttggaaagattttaagttttttggagagagatatttatatttttttttgtaggtaaaaattgtattaagaaggtgggtttggtggtttatatttgtaattttagtattttgggtggttgaggtggatggattattggaggttaggtgtttgagattagtttgggtaatgtggtaaaattttgtttttattaaaaatgtgaaaattaattgggtggggtggtaagtatttgtaattttagttatttgattggttgagttataagaattgtttgaatttgggaggtagaggttgtggtgagttgagattatgttattgtattttagtttgggtgatagagtgagtttttgttttaaaaaaaaaaaaagaaaaaagtggttgggtgtattggtttatgtttgtaattttagtattttagtattttgggaggtggaggtgggtggattatttgaggtttgaagttttagattagtttggttgatatggtgaaattttgtttttattaaaaatataaaaattagttaggtgtggtggtaggggtttgtaattttagttatttgggaggttgaggtataagaatagtttgaatttgggaggtggaggttgtagtgagttgaggttatgttattgtattttagtttgggtgatatagtgagattttattttaaaaaaaaagttttaaatgttttttttaaatgaatgaataagtaataattttttaaaaaaattgtattaagaaaagaggtagttattatatataatttattttttgaaaatttgttttggtggttggtatgttttttgagtaaagtgtaatttatgatttttttttttatgggatggggtggggtagagggagtttttaagtttgttaagagttagtattagaaggagtttttgagtaatttggtgatttgtgtttttttgttttatgtttagataatgttttaatgtgtttttttttgtaaatttttttaattttgtatttttttttagtggaaaatgtggaaggtaggggagttatgaagattagtgtgtttttaaatggtttggatagagttgtttattagtttgtgttttttggtatatgttttttttaatttttggatttgggttataggttgttatttataatggtaaggttagattttttagggagtattggaggagtattatttggtgaatgaggagggatattttatggtgatattaggaaggatgggggaagtatttggggtgttagagattttagggatatggagttggaggttgggtggtttttgaagtatagttgagttttgtatatgttagtaggttagaagtaggaaaatatataagtttaagttggttttttgtatattgtgtataaaaagattagatttaggatgatttggtgggattgttaggggttgattggagtgttgttgggaaggagttttagttttgttttaggttttttattaggtaggattgggatttttttagggtttggaggagtaagtttttgtaggtttagttttaggttggtgtgaaattgaagagtttttgtattttgtttgggttggtgggtttggtttgtattgtttggtattgtttatttgttaggatttttttgtatagagtatttagtagttatttaatgtttgtgatttttgtgataagtgtagtttggtgttggtttataaagtgtaggtttgggggtgggaggagaatatgagttagtagttagggtgtggggtttgtttttgttgaatttgagttttttaggaatttttttgtaagtttaggggtagggttttagggggtggttattaggattttatatgtagtgggatgagg

SEQ ID NO: 291 - DNA, 2501 bp, Artificial Sequence
  chemically treated genomic DNA (Homo sapiens)
ttttattttattgtatgtggggttttggtggttgttttttggagttttgtttttaggtttgtagaggaatttttgaagaatttaagtttagtagggataggttttatattttggttgttggtttatgttttttttttatttttaggtttgtattttatagattagtattgggttgtgtttattgtgagggttataaatgttgagtggttgttggatgttttgtatgggaaggttttgatggatgagtagtattaggtagtgtgggttgagtttattaatttaagtaagatgtggaagttttttagttttatattagtttggaattggatttgtaaggatttgtttttttaggttttaagggagttttagttttatttggtggaggatttggagtggagttgaggtttttttttagtaatattttggttagtttttggtaattttattaaattattttgaatttgatttttttatatataatatatgaaaagttagtttgaatttgtgtgtttttttgtttttagtttgttggtatgtgtagagtttagttatgttttagaggttatttagtttttagttttatgtttttagggtttttggtattttaaatgttttttttattttttttggtattgttatggaatatttttttttatttattaggtggtgtttttttagtgttttttaaagggtttaattttattattatagataatagtttgtgatttaggtttgaaggttaaaagaggtatgtattaaagggtgtaaattggtgggtagttttgtttaagttatttagaaatatattagtttttatagtttttttattttttatattttttattggagaaaaatgtagaattagagaaatttgtagggggagatatattagagtattatttaaatataggatagaagagtataagttattaaattgtttgagggttttttttggtgttggtttttaataggtttaaaggttttttttgttttattttattttgtgggggaaagggttataggttgtattttgtttaaaaaatatgttaattattaaagtagatttttaggaaatgagttgtgtgtggtagttgtttttttttttgatgtgatttttttggagggttattatttatttatttatttgaaaggaatatttaaaattttttttttgagatggaattttgttgtgttatttagattggagtgtagtggtgtgattttagtttattgtaatttttattttttaggtttaagttatttttgtgttttagttttttgaatagttgggattataggtttttgttattatatttggttagtttttgtgtttttagtagaaataaagttttattatgttagttaggttggtttggaattttggattttaagtggtttatttgtttttattttttaaagtgttggggtgttggaattataggtgtgagttaatgtatttggttatttttttttttttttttttttgagatggaggtttattttgttatttaggttggagtgtagtagtatgattttagtttattgtaatttttgttttttaggtttaagtaatttttgtggtttagttagttaagtaattggaattataggtgtttgttattttatttggttaatttttgtatttttagtagaaatgggattttgttatgttgtttaggttggttttaaatatttgatttttagtgatttatttattttagttgtttaaagtgttgggattataggtgtgagttattgggtttatttttttgatgtaatttttgtttataaagggaaatatgagtatttttttttaggaaatttgaggtttttttagaggttgtttgggaaagtaggaatttagggttattttttaagtatattttataagtaattttttttggttttgaagagggaggatttgtaaagtaatgggtagatattaaggagattttgaattttatttttaggaattattaaataattattttttaattttattgttttattaggtttatttttaattatattttatttgtaatatattttttattttgttttttttgtttttagttttaagagtttgagaaatttaaattgattatgggaatagatttttattttttttgagatgggattttatttgttgttttggttggtgtgtagtggtgtgattatggtttattgtagttttaaatttttgggtttaagtaattttttagttttagttttttgaatagttgggattataggtgtatattattatgtttagttgattgttatttttaataggatatttaaattttttttttaatttggtatttaattttatgtaattttttttttttttatatatttatgattttattattatttgtttatattaggtgtttttgtatatgttgatttttttatttttggatattttgatattttttatttgttttagattgtttatatgtatgtgtttttttgggttttagaggttttttttagtgttt

SEQ ID NO: 292 - DNA, 11913 bp, Artificial Sequence
  chemically treated genomic DNA (Homo sapiens)
taaagtagggtgttattaaagaaagaaggaagaaattggttaaatgaatttagaatataaataaaattattgtataaataaaatttttgtttatgattaagttggaatggtggttaaaaaagaaaagggaaaaaaaatttttagatgtaggtagatttttataattaagttattttttaaaggggaagtaaatgtgatagaatatttagtaagtaaatttattgaggaatattttgtttttatataattaaatttaatattgaggtaaaattgataattattaaattgagggtagttgggagagggaaaggggatgagataaaatttagtttataaaatattttattattttttataggttaaaaaatataaaagaaatatttggaaagaattgtttaagatggaaagattttaagattgtgtgattttttttttttttttttttttttttttttttttataggtgtagaataatttttttttttttttttgtggttttttttttttttattttttttttttgttgtttgtaaagttgaatttggggttaggagttttaattgtaattttagattggaattttagatggtgtgtttaggattggaagtaatttttagtttattaattttatgggtttatgtatttgttttggttatggtttggtttttatttttattgtggtattaatgtagaataaattgagatatattttttatataattagttttagaatttaaaaagatttatggtataataatagaggtagtgttgtggaatttttttattgaggatttttggggagtttggggattattttgtggtggtattagaatagatgagtaattttagtggttttaggtattgtgaattgggggagagggggaaattttgtattgtatttggtagtatttaatggttttgggtttttagatagggttagtgaggagagttaggatagtaagtggggattggttaaaaaaaattgatttaattttgaaatgattagaagaagttgggagtagttattataaagttttttttttgtttttttttttttttaattgaaggaatgatgttgaaatttttattgttagtgtggggttgggaattattttaaatatttgttttgtagttttgagtgggtagattttgaagagttggagttggtggggaggggaggaatagttgttgggttgttttgtgtgtggggtttggggtgtgggttttggggagaggtgttagttgaaagtttgttttttttttgtgataggtagtagtgaggttgagttattttttattatggtttgtgggttttgtgtgtagtgtggttgtttttgtttttgattgattgtagtgttttggggtgtttatttagttgtttgtggttgttgggtgatttttggagggtggtttaggtgtgtgtattggtttttggggttgtggttgtagtagtttagttttgtgttttgttagatgtagtggatagtgttggggtgaaagtaagggttgagaaatttttattgttttgtttttatttagttttgatttttttatattgtaataattatgtatttttgaggttgggatgtttgtgttttgttagtgtattaatgttatatggttttttaggggttgtttttgtttttgtattttattagttttgaagaggtagaggggtggtgggtaaaatttttaattggatgttgagagatttgggttttagtttggtgttgttattaatttgttttttgtttttaaatagtagtagtaataaaaattgtaaagttgattgagttaaaggtttatattgtttttttatttaatttttagaataattttatgaggtgggtgttagtattttattattttgtttgattagtaaggaaattgaggtttagagagattgtggaatttgtttagggttatatagttgttggttatttggtagagttgaggttttattttggggttattaattttttgttttttattgttgtgttttatagattgttttttttttggttgtttgggttttagtttttttttttgtaaaatgagaagtttaatttgtagttttttttgttaattggtggtttagattaggaatttttgttatagattttggtgttgataggggtaagaaggtgggtgaaagaagggggtgtttagttttttatagtttgtttttttttgggattttgtgaagggtgggttttgtgagttaaaggaggtataggagagtgtttattgtttgtggtgggtgaaggtgttatttgtttttgtgttaggttgtgagttttggtgtttagtttagggtgttaaggttagtgtagttggtatgttttttttggaaaattttaggttttttgtagagaatgttatttataataaagaagaggatagagaggtatggagtgttttgtgattgtaggagtatgttagttttttagtgttggtttagtgttgtttgggtttttgggtatgtggatttgttggggttgtatggagattttttgttgggtttttggggttttttgattgtggttttttagtttagtattttttttttggttttgtaggttgtagggaattttttttatttttttagttggagaagtttaagttgggtgagggggtattttggggtttgtattggtgttttttttttttttgtttttataaggattttgagaaaataaatggtagaggagagaggagttttatatttgtttggtttttttttttttttatttatttttatattttttattttggggtaaaaatttatttttgaaaaatgttggtagagatttatgtgtttttgttttatttgggttttataaatataatgatttatatttaagttagtttttttttagataattttttttttttttgttaaaagtgttaaggatggtaaaagaagaaataattttaatttttttgtttggaaatgaaagtttttggttttttataaagggttttttgttttttatagttgagttttagttaagaaaaatgatttttaagtagaaataataggtggggagaaggaagggagatatagggatttggggggtttttagggtaattggtagtgaattttgttttgagagttttttttttatttaaaaaattaaatgtgtgagttttgtgaaaggtttagggatagattgtgtgggagaggattgagtagagagtgtgggggtagtgttttgtagaatttttttttttttaataataattttaaaagtttttgagtggagatgatgtaaagttaagtagtaaaggtggtttgggaggtaagtggagggtttaagtgttgtatttttatttttagggttttttgtgtttatgggatgtgtatttttaagaagtgtgttttttgagtaagttttgggtttgtatatattttgggtttgtagttagaatttaatggtgataatgtttatgtaatgtaagttaaaaattaaagtgtaaaaaattattatgttatttattgaaatgttattttttgttaaattgtaattattttgttttatataagtttggttggaaagtttgtagttttagtttgggttagttaggtataggaggttggattgtaattggttgttttttttttgttgtgtttggttgttttatgttgtgttgttgttgttgttttttggtgtttttgggattttatatgtatttttgaaatatgttttgttttggtttttggtttttttttttgtttaggggttgttttttaatagatattgatttttttagaagatttaaaaattaaattaaaatattttttatttgttttaaatatttgttttggggtgtgggggttgttaaatagagattagatgaagggagttagatttagtgaagttttttgagtttttaaagatttgaatattaatttgtgtttgtgggttgatggaggttttttttattttattttttggtttttttaattggtttttgttttttggttaattattgagtaattagaatggtatttttgattagggttataggtagtgtttggtggagtggttttaggagttatttgttttttgttgggttttgtatttaaatttttttttttattttttttttttaaattgggtgttaggatgttttggttggaatatatgtaggttttgggtgtttgtttaagggttttttttttttttaaattagttgttgtttttttggtttaattgtagaagaattagatattttttattggaaagggaaattaagtgttgttgattttaattttaggtaggtggtaattgttttttgtttggtgtaaattttattaagtaaataattattagttgattgaaatatgtttggtttataattggtgtaatttttggttatttaattgagggatgtttgtttttagttttgatttttggaatttataaagggttatttttttttttagtgattttaagattatggttatttttttatttgatagttttagaagtaagagttagatttaagggtgtaaagtaagggtatatgtttttttgaagtttgattgagttttttttgtgtttttttgaagtttttgtttttttggagtttatttgtttttttttttaaattatttttttagattaataattttatttttatttttattgtatttgattttgtttggatttattgtttatttgaatggattttttagtgagatgaggtttttatattggtgaaggttaagaaggggaggtggggggagggttgtgttatattggttagttgagagtgtgtgttgggttgaagaggagggtgtttttgagagggatgtttttttggatttgtttttattttagttgtgagggtgtttttaaggagtagtgtgtgttgtttggttgggtttgggttgttgagtgaatggagtggttgagttttttggtttttttttttttttgtgttgttggttttttttatttgagttttgggaagttgagggtagttaggtagttggggtaaggagtttaaggtagtgtttatatttgggggttttttgtaatttgattgtttgtttgtttttttattttttgtttttttttttatttatttatttatttatttatttatttagagttgggatggtagtttaggtgtttgggttttgttgtttttttgttgtgattttggatttttttttgttgtaggatttggtttttatgtgtgttttggagttggtgttttagtatatgttttgttttgggtttgggtgtttatagtagttagagtagtagggagtttgggatttgggtggtatttgggttaagttaggtgttgttgaggttagtgttgaatgtttttagggttggaggagttgtggggtgtttgggtttgagttgtagtaaatgggttttgatgtgtgggatttgaatgtgttgttgtttgttgttttttttttgggtggtggtggtggttgtgttttgtttgtgagtggtgtggtgtagtgggtgttggtgttggattttgtgtttttgggtgttttggtttatgggttgttgggtggttttgtgttgttattggttttgttgttatttttgttgttgttgttttatttttttattaaataggagttgagttggggtggtgtggagttgtatgaggagtagtgtttgagtgtttttattgtttatttttttggttagtttattggtatagttggagtttgttgttatgggttttttggtttttttttgtttagttaggtgttatttggttaggttaggatgttttttaatgtgttttatttgtttagttgttttgagagttagtttgttatttgtaattagggtaagtaggttggggagtgttttttatgtgtggggtagtggtgttagggattttttgttttaggatattttttttttttattttttttgattgtagtttttatttagttgttttttaagggttgtgaggatagtggaagtggtggttggggaggaggttggagagtgggagtgtatgtaggtattggtttttgatattttttaaagttaggtagagttaggagtttgattgtttgtaagagttgggagggtgtttggggttttttagagtttgagagattttgggattgttagtttttatgggagtggaattaggagattggtgtagtgtttggttttgttttggggagagttttgttaattaaggaaatgttaaattgttattaagtgtagtgttttttagatgtttggattttggatttggagtgggattagtgtgggggtgagtgtttgtgttgtgttgtttttgtagtgttaaaatgtttaggagtatttttagtttttataatatggtgttggtatatatttaggtgtatattaagtattgtagagaattagaatgagtatatgtatttttagtaattaaatggttttttggaatagtgttgtgtttgtggatagtttttgtgtatggtaatatagaagtggatttttattgggttttgtttaggtggtggttatgtaggttttggggatggaagagaatttgatttatttgagtttaagttatgtgggattaggttttattgtaggtagtggaaggaggtatgagttttggttttttttttagtgtatttggggtgtttttttattttgtaaatgtggggtttagttgggatagtatttttttaagatttggggttagaataaggatagggttatttgttgtgtttagttaggatataaggagggaatttggtatatgataagtattaggttggttttttattttgtgttgatgtttgtttattttttttttgtttgggtggtgtggatttgaatttgtggagtttttgtagtttgttttttttatttatttttagtggatttttatgttattgagaatttaagttagtttggtttgatttggtaatttagtaaatgttttattaatataatggtggatgttttttttggagtaaaattatttgagggtttagggattgggatgtttttggaatgtgtgggaagtagagtgtattttttgtaggaggtatttttgtttaaggtttgggagaagggttttgtttttgttgtttgtttttatttgtgttttttaaatgtgtgtttttaggttgtttttattttagtttaattaggagtatttggtttttgtgaagttttggagaaattgaaattgtttttttttttgggagaatttgggattattgttttgtggaggaattgtaagtagatttaagggttgtttttattttatgtttttagttagtgaaattagtgttttgtatttaaggggtgttgggataatttattggttgttgaggtttgtgttttttgattagattgtgttatttttgtttagtaggttggtgttatttttggggagtttttaggttttagtgtttttgtttataagaggatagttgagatgggtaatttggagattgggtttggtttgaagttatattttatagatgtagaagtgttatttattatttttttggggttttaaatatggaatttggtaatttatttaaatatttgtgattgagaaataatgaatttgagagtattgtttgtatgtgtgttatttggaggtggttgagaaattattgaatttatgtttttggggtataaaatattattatgttattatttttttagtatttttaggggatttttgaaatttgggttttgttgttttgtttgggttttttgtttagttttttttagggtaggtttggtgtttgggattttattatatgttgtggggggtgggattgtgggttttgtagttagtaggtattatatttttggaaaatatttggatttttttgtaatatataggtgtggttgttatggagaaaaagttaaaaggggattaggattagtaggtgaatgtattttttttttttattttggagaaaaagtttaatggagagagggttttagatttaagttatatagtttggaagtattatttttaggtttaagttttgttttgtagtgaaaatagatgggtttattttatttagtttttgaggtttattgggtagtttggatgtgagaagtgttttggttgttattttggagtgggtaagggtggtttttgagattttgggtttattttttggatttttagggtttttgttgtttttttaggaatgtagggtttggtttaagatttgggttgtgagaggtaagggtattaatttttaaaaatgtggaaatggttattagagtgttaaggttaaattttaggggagaggaattaaggttgtttttggatttttagggtagtttagttatggtgtataggtaggggtaattgttggtatttatttataattgtttaaaattttataagtatgtttatattttaaatttttaaatattatattttgtattttaattttgtaaatattaatttagtaaatattaattgtttatttggttaggtattgggttttgaatattaattaagataatggttttgagaatttttgtaagaagtttattagttaattttggagaggttttttgttttggatgaggaaatttaggttttatgagattaggtggtagaggtgggatttgaatttagattatgttagggtgtttttattttttttttagggattttggttttattgttgagatggattttttttggtttgtgggaggggtattaaatttttagtttatgtgtgggggttgatgggtttgtgagggtagatgtggggtgaggatttgagtagttttagattagatgtaaggtttaaggaggaggggaaaaaagtttgtttgggttggatgtggtggtttgaggtggttggattatttgaggttaggagtttgagattagtttggttaatatggtgaaattttgtttttattgaaaatataaaaaaaaaaattggttgggtttggtgatgggtgtttataattttagttatttgggaggttgaggtataagaattgtttgaatttgggaggttgaggttgaagtgagttgagattgtgttattgtattgtagtttgggtgatagagtgaaattttgttttggaaaaaaaaaaaaaaaaaagaggttgtttgttagtttattgattttgtagttttgtaggtttgtagaattttaaggtatgattaggtttgggattattaggttattttagggttaggtgtggaggtttgtgatgtttgagggttaaaggtttttttttttggttatataggagagggtattttgttgggggataggttttttttaattatagtgtagttgtagttattgtttttagttttttgagtatttttttggttgagtttgttgtttattttattttttagtttttatggtttggttaggttaggtggtttttggtttttttgtagttgttggtgggggaggagggtatagagtgtgttttgttttttagtgtatggttaaggttgtgttttttttttgggttgggattaattgtgggaaaggtgttattttggttatttgattttttttttttaaggtttgtataaggagtttttgaatatgttgttttttttagttggtagttttattttttttggtttttgtttttgtattttttgtgttaggttaagtgttgggtttagggatagtgtgttttaattaaatttgtgtttgataagtttttaattaaaagagatttttttttgttttgtaggtgtttttattattgttttttttggggggatttgaaggagagggtttgaggttggtttttgtttgttgaggtttgtgtgtttggtttgggaggaggtttaggagggtttgtgggttatgggtatttttgggtttgagttttggggtgtggatggatgttttgagagtgggtgttgtgatttgggatttatggtttttgttgggtatggatagttgtggagtagggttttgaggattgtgtagtgttttgggtttttgtttatttttgggtttaggaatggagaagggtttgtttagagaaaatttttttgtagtttttattttgtttttttttttttttttttttttttttttttttttttttttttttttttttttttttttgtgtttgtttttttttttttttttttttttttagtgtttttttagaaatttggtttttattttgggtaatagtgggtgttttgagttaaattttgtttgtaagtttatttataggttttaaagaaggttaggttttaggttttaaaaggaagtttgtggaagtttaaatgtgtttgtttatgtaggagagttaatggggttgggggttatttttgtttatttagtaggagagaaatggaggtttttgaggttatatgataaaagttagtggttttttaaatttttagtgtgtggtgttgagtagtgtgtgagatttaagtttggatttgtattatttgggagttaggatttgtttttttttttttttttttgtattttgttatattattttttaggtttatgtttttgttgttttagagaagttttttttttttttttttttttttttttttttttgggtggggggtggtggtgtgtgtgtatgagtgtttgtgtgtgttttgaaaatggaggtaatgatgttttgggttttgtttattggttgagttttgtttaagtttttggaggtattttggttaaatagtgtaagagtgggagaatgggtgttgtttgatttaatttatttttgagaattttgtgaagtttggagatttagggtagttttgggttaggaggatttgaggttgttggggtggttttgttaggattttataggagtagttttttttagttattgtgtttggattttaggttatagattttggaatttgtagaggaatgagattttatttttgggttttggggttaatgatgtatttttagttgaaggatttttttttttagaggtagtaatagttttttagaagtttgtggggtataagtttaaagtaatttaataataaaaattataaaagattatgttttttaattgaggttttatgtttttttttttattttgggggggggggggaatgttaggatttttttagggggaaattgaggtaaaggattgaagtattattatggagggaaagggagatatagtgttaggtatattttaaaggaaattggttgtttagtttggggagtgaggaagttggtttttatagtagtggttagggttggatttttgggtgtaaggtgggttttataggggggaggaggaggagagtgtagggttgttatttgaaggtttaattggaaggggtttttgtttttttttttattagtttttttttgggtgttatggtgttaggttgggtagttttagatagataatattatttggtaattattttttttatttttaagattaggttatttaattggttttgagtaattaatgaaagttggtgtgtgggtttttgatttatagtttggagttaatgtggggttagtttagtagatttattttgtttgtttgtgttgtttttgtggaagagttgtagtttatttttggggggtgaataattttttttgttgattaggtaatgagttttatatttaatttgttaggggtttgttgtagaagtggtagagattgtagaagattgtggtataaataaattgggaaaaagtgaggtgggggttttagttagaaaaggatggagaagtttgttttaaggttatatttagggatttgggttgtttttttgttgaaagttttggaggtttgtggggttggatttttttttgttgggggtttgaatgtggggtttagtgtatattttttttgtttgtggttggtttagatttattgttttgttttgtgagagtattgttgatattgtgtttttttttgttgtttttgtagg

SEQ ID NO: 293 - DNA, 11913 bp, Artificial Sequence
  chemically treated genomic DNA (Homo sapiens)
tttgtgggagtggtggagagaagtatagtgttagtggtgtttttgtaagatggggtagtgggtttgaattagttatgggtggggggggtgtgtgttgaattttgtatttggatttttagtggaggagaatttagttttataagtttttaggatttttggtaggaagatggtttaagtttttggatgtgattttgggataggtttttttatttttttttgattaaaatttttattttgtttttttttaatttatttatgttgtagttttttatggtttttgttgtttttgtagtgaatttttggtaaattaagtataaaatttgttgtttgattgatagagaaggttgtttattttttaaaaataaattgtagtttttttgtaggagtagtgtgggtaagtgaaatgaatttgttgggttaattttgtgttgattttgagttgtaaattaggggtttgtgtattaatttttattaattatttggagttagttaaatggtttggttttaaaaatgggaagagtaattattgagtaatgttatttgtttggggttatttgatttgatattatgatatttaagggaaagttggtgagggggaaaataagggttttttttagttgggtttttagatggtgattttgtgttttttttttttttttttttatgggatttattttgtgtttaggggtttgattttgattattgttgtaggagttaatttttttattttttaggttggataattaattttttttagagtgtgtttgatattgtatttttttttttttttatggtagtgttttggttttttgttttagtttttttttagggaaattttagtatttttttttttttttaaagtgagaaaaagagtgtggagttttagttggaaaatatagttttttataatttttgttattaaattgttttaaatttatattttataagtttttggaaagttgttgttgtttttggggaaaaggattttttggttaaagatatgttattggttttggaatttaaggatggggttttatttttttataagttttggagtttgtggtttgaagtttagatataatggttaaggagagttgtttttatgggattttggtagggttattttagtagttttagatttttttggtttaggattgttttgggtttttaaattttataaaatttttaggagtaaattgggttaaatagtatttatttttttatttttgtattatttgattaaagtgtttttaaagatttaagtaggatttagttgatgagtaggatttagggtattgttatttttatttttgaaatatatatggatgtttatgtatatatattattattttttgtttagaaaaaaaaaaaaagaaaaagaaaaaaaaaaagtttttttggggtaatagaggtatgagtttggagggtggtgtggtagagtgtaagggagggaaggagggggtaaattttaatttttggatagtataggtttaggtttaagttttatatattgtttagtattatatattggggatttgagaagttattagtttttattatatgattttgagggtttttattttttttttgttaagtgggtaaagataatttttggttttgttagtttttttgtatgggtgagtatgtttgggtttttatagatttttttttgaaatttgaggtttggttttttttgaggtttatagatgagtttataaatgaaatttggtttagggtatttattattgtttggagtgaaggttgaatttttgaaaggatattaaaaagagagagagagaaagagagatagatatagagagagagagagagagggagggagagagagagagagagagagagagagagagagagatgaaatagaagttatgaagaagttttttttagatgaatttttttttatttttgagtttaggagtaggtagggatttagggtattgtataatttttagagttttgttttgtaattgtttgtgtttggtgagggttgtgggttttgagttgtggtatttatttttgagatgtttgtttgtattttagaatttgggtttaaggatgtttgtggtttgtgagtttttttaggtttttttttagattggatatgtagattttggtgggtaaagattggttttaaatttttttttttaggtttttttgggaggggtagtggtgaaagtgtttgtggagtggagggaggttttttttaattagaagtttattggatatgggtttgattagagtgtgttgtttttgggtttagtgtttggtttggtgtggagagtgtgggggtaggggttaggggaggtaaagttgttggttggaaggagtagtgtgtttaaaggttttttgtataggttttggagggagagaattgagtggttaaggtagtgttttttttatggttagttttggtttgggaggggagtgtaattttgattgtgtgttaagaggtgagatgtgttttgtgttttttttttttgttggtggttgtagagaagttgggaattgtttggtttggttgggttgtgagagttgaggggtgaaatggatagtaggtttagttaggaaggtgtttagaaggttgaaaatgatgattgtagttgtattgtgattggggaaaatttgttttttaataaaatatttttttttgtgtgattggaagagggagtttttggtttttgggtgttgtaggtttttgtatttgattttagggtggtttgatgattttaggtttaattatgttttagggttttgtgagtttgtggggttgtgggattagtggattagtaggtaattttttttttttttttttttttttgagatggagttttgttttgttgtttaggttgtagtgtagtggtgtgattttagtttattttaattttagttttttgggtttaaatgatttttgtgttttagttttttgagtagttgggattataggtgtttgttattaagtttggttaatttttttttttgtatttttagtagagatagggttttattgtgttggttaggttggttttaaatttttgattttaggtgatttaattgttttgagttattgtgtttggtttaagtaagtttttttttttttttttttaagttttgtatttagtttggggttatttaagtttttattttatatttgtttttataaatttgttaatttttatatatggattaagagtttggtgttttttttgtaggttagaagaaatttattttaatggtggggttaagatttttggaaaaggagtagaaatattttagtatggtttgggtttaaattttatttttgttatttaattttatagaatttggatttttttatttaaaataaggggtttttttaggattagttggtgagttttttgtaaaggtttttgaggttattgttttaattaatatttagaatttagtgtttgattaagtaggtgattgatgtttgttaaattaatgtttataagattaggatgtaagatataatatttaagaatttaaaatatgaatatgtttgtgaagttttgggtggttgtgagtgggtattaataattgtttttgtttgtgtattatggttagattgttttagggatttagagatggttttgattttttttttttggggtttggttttggtgttttgatggttatttttatatttttgagagttgatgtttttgttttttatagtttaagttttgggttaggttttgtatttttggggaagtagtaggaattttggaaatttaaagaataaatttagaattttgagggttatttttgtttattttaggatagtagttggagtgttttttatatttaagttgtttaatgagttttaagggttgggtaagatggatttatttgtttttattgtaagataaaatttaaatttggagatggtgtttttaggttatatgatttgaatttagggttttttttttattgggttttttttttagggtggagaagaaggatatatttatttattagttttggtttttttttaattttttttttatggtagttatgtttgtatattatagaagaatttagatattttttagaagtgtaatgtttgttggttgtaaaatttatagttttattttttatgatatgtgataagattttaggtattagatttgttttgaaaagggttggataagggatttaaatgaagtgatagaatttaggttttaaaaattttttagaagtattaaaaagataatggtgtagtagtattttgtgttttaggggtatggatttgatggttttttaattgtttttaaatagtatatatgtagatagtgtttttggatttattgttttttagttatagatgtttagatgggttgttgagttttatatttaaagttttaagagggtggtgggtagtgtttttgtatttatggagtataattttaagttggatttaatttttaggttgtttattttagttgtttttttatagatggggatattgagatttagaaattttttaaaagtaatattagtttgttaaataaaggtggtgtgatttgattaaagaatataagttttagtgattagtaagttgttttaatgttttttgagtataaaatattaattttattaattaaaagtatagagtggaggtaatttttgggtttgtttgtggtttttttataggatagtgattttagatttttttgaagaaaagggtggttttgatttttttaaggttttgtgggggttgggtgtttttggttaggttaaggtaggagtggtttgaagatgtgtgtttagaaggtgtgggtgaaggtgggtaataagggtagagttttttttttgagttttgggtgaaggtattttttgtaaaagatatattttgttttttatgtattttaaaaatattttggtttttaggtttttgagtaattttgttttaggaaaagtatttgttattgtattagtaaagtgtttattaaattattgaattaaattgaattggtttaggtttttaatagtgtggaaatttattgaaaataaatgaagagggtaaattataggggttttgtaggtttgggtttgtgttgtttaggtgaaagagaggtgggtgggtattggtgtgggatgagaaattaatttgatatttattgtgtgttgagttttttttttgtattttgattaagtatagtgaataattttgtttttgttttaattttaggttttgaagaaatattgttttagttgagttttgtgtttataagatgaagaggtgttttagatgtgttgaaagaaaggttaaagtttgtgtttttttttattgtttgtggtagaatttggttttgtatagtttggatttggataagttaagtttttttttatttttagaatttgtgtggttgttgtttgagtgaagtttagtgaagatttatttttgtattattatatgtgggagttatttatggatatgatgttgttttagaaagttatttagttattggaggtgtatgtgtttattttagttttttatgatatttaatgtgtatttaagtgtgtgttaatattgtattataagggttggaggtgtttttggatattttagtgttgtggaggtagtatagtataggtgtttatttttgtgttggttttattttgaatttagagtttagatgtttgaaaagtgttatgtttggtgataatttggtgtttttttaattaataaaattttttttaaggtagagttagatattgtgttggttttttggttttatttttgtggggattagtagttttggaattttttggattttaaggggttttagatgtttttttggtttttgtgaatagttaggtttttagttttgtttggttttggaggatgttgggggttagtgtttgtgtgtatttttattttttggttttttttttagttgttgtttttgttatttttatggtttttgggaagtagttgggtaagagttgtggttaaaaggggtaggagaggggggtgttttagagtggagagtttttggtgttattgttttgtgtgtagggggtgttttttggtttatttattttgattgtgaatagtgggttggtttttgaggtagttgggtaggtagggtgtgttaggaaatattttggtttggttggatgatgtttggttgggtggaggaggattgaagggtttgtagtgataggttttggttgtgttagtgaattggttggaaaagtggatagtgaaggtgtttaggtattgttttttgtgtggttttgtgttgttttagtttggtttttgtttgatgaaggagtgaggtggtggtggtgggggtggtggtggagttggtggtggtgtggggttgtttaatgatttgtaagttgaagtgtttgggggtgtaaagtttagtattggtgtttattgtgttgtgttgtttataggtagggtatagttgttgttgttatttagggaggggatggtgggtagtagtgtgtttaggttttgtatgttggagtttatttgttgtggtttagatttggatgttttgtggtttttttggttttggagatgtttagtgttggttttggtggtgtttaatttggtttagatgttgtttgggttttggattttttgttgttttggttgttgtaggtatttaggtttggagtggagtgtgtgttgagatgttggttttgggatatatgtggaagttgggttttgtagtaagaggaagtttaggattgtggtgaggagatggtggggtttgggtgtttgggttgttgttttggttttgggtgggtgggtgggtgaatgagtaggtgggagggagggtgggaagtgggggagtggataggtggttgggttgtggagagtttttgggtgtgggtgttgttttgaattttttattttagttgtttggttgtttttagttttttaaagtttaaataagaggggttggtggtgtggggaagaggaggagttaggaggtttggttgttttatttatttagtagtttaagtttggttaggtagtgtgtgttgttttttgggggtgtttttgtagttggggtgagggtgggtttgagggagtgttttttttggagatatttttttttttaatttaatatgtgtttttagttggttggtgtggtataattttttttttattttttttttttggtttttgttagtgtgggagttttgttttattggagagtttgtttaggtaagtagtgagtttgggtagggttgaatgtggtgggagtagagatggggttgttaatttaaaagagtggtttggagggaggggtaggtaggttttaagagggtgggaattttaggaaagtgtagaaagaatttagttaagttttaaagaagtgtatatttttgttttgtatttttgagtttggtttttgtttttagaattgttgggtaggggagtggttatgattttggggttattggggaaagaggtggttttttgtgggttttagaggttgggattgaaagtgaatgttttttagttgggtggttgggagttgtattagttataagttgggtgtattttgattggttagtagttgtttatttggtgaggtttgtgttaggtggaaggtggttgttgtttatttaaaattggagttagtagtatttagtttttttttttagtgaggaatatttaatttttttatggttaagttgggaaaatagtggttagtttaggagggaagaaaatttttgggtaaatgtttaaagtttgtgtatattttggttggagtattttggtgtttagtttggggaggaggggtgaaggggagggtttggatatgaagtttggtagggagtgggtaatttttggagttattttgttgagtattgtttgtggttttggttgaggatattattttggttgtttagtgattgattaggaggtggaagttagttaaggggattaaggagtggagtagggagaatttttattggtttatgggtgtgagttagtgtttgaatttttgggagtttgaagagttttgttaaatttgattttttttgtttagtttttgtttggtagtttttgtgttttagagtaggtgtttggggtgggtagggggtgttttggtttggtttttggattttttaaaggagttagtatttattgggaaataatttttaggtaaggagaagaattgggggttggagtggagtgtgttttagaggtgtgtataaaattttaggggtgttaggaggtagtagtgatggtgtagtgtgggatggttaggtgtgatgggagggaagtaattggttgtagtttggttttttgtatttggttggtttgggttggggttgtaagttttttagttaaatttatgtgaagtaaagtagttgtagtttgataaagaatggtgttttaataaatgatatagtaattttttatgttttggtttttagtttgtattgtataaatgttgttgttattaaattttggttgtggatttgaagtgtgtgtgggtttaggatttatttgaagggtgtattttttgggaatgtgtattttgtaggtgtaggagattttgagggtaaagatgtggtatttgagttttttgtttgttttttaggttatttttgttgtttgattttgtgttgtttttatttagaagtttttaaaattattattaagaaaagaaagattttataagatattgtttttatgttttttgtttagtttttttttatatgatttatttttaaattttttgtggggtttgtgtgtttggttttttgagtggagaaaggatttttgagataaaatttattgttagttgttttaagaattttttagatttttgtattttttttttttttttttgtttattatttttatttggaagttgttttttttaattaggatttaattgtgaggggtgaggagttttttatgaaaagttggggatttttatttttaaatgaaaagattgagattgtttttttttttattatttttggtatttttagtggggggagaggaggttatttgaagggaggttggtttgaatgtgagttgttgtgtttgtgaaatttaggtaaggtaaagatatgtaaatttttgttaatattttttaaaaataagtttttgttttggggtgagggatgtaggggtggataggaggaaaggagagttaagtaaatgtagaattttttttttttttgttatttatttttttagaatttttgtgggggtggggaggggaagagtattggtgtgaattttggggtgtttttttgtttgatttggatttttttgattaaagaggtgggaggagttttttgtagtttgtggggttaagaagaaagtgttaagttgaggagttgtagttggaggattttagggatttgataggaagtttttgtatgattttaatggatttatatgtttggaagtttaggtgatattaagttagtgttggggaattgatgtatttttgtagttgtagggtgttttatgtttttttgtttttttttttgttgtgggtaatgttttttgtgggagatttgaggttttttaagggggatatgttagttatattggttttggtgttttgagttaagtattaggatttatagtttagtatgaaggtaggtagtatttttatttgttgtggatgataggtgtttttttgtattttttttagtttgtgaggtttgttttttgtgaggttttagagaaaagtaggttgtggaaaattgggtgttttttttttttatttatttttttatttttgttagtgttgagatttgtagtagaggtttttggtttgaattattgattggtaaagaaagttgtagattaaattttttgttttatagagaaggaaattgaggtttagatagttgaaggagaggtagtttatggagtgtagtggtaaagagtaaggggttggtggttttagaatggaattttagttttgttaggtaattaatagttgtgtgattttagatgagttttgtagtttttttgagttttagtttttttattggttaaatgggataatgggatattagtgtttattttatagagttgttttgaggattagataggagagtagtgtgggtttttgatttaattaattttatagtttttgttattattattgtttaaggataggaaataagttagtggtaatgttgagttgaaatttgggttttttaatgtttagttggaggttttatttattatttttttatttttttagagttaatgggatgtagaggtgaggatagtttttggaaaattatgtggtgttgatatattggtaaagtgtaggtattttggttttgaaggtgtataattattgtaatatgaaaaaattgaggttgggtaggagtagggtagtgaggattttttaatttttatttttattttggtgttgtttattgtatttgatagagtgtggagttgggttgttatagttgtaattttagggattagtgtgtatgtttgggttgttttttgggagttatttagtggttgtggataattgaataaatattttaaagtgttgtggttggttaagggtggggatagttatattgtgtgtggggtttgtaggttgtaataaagagtggtttgattttgttgttgtttgttgtgggagaggaataagtttttgattagtgtttttttttggggtttgtgttttgagttttatgtgtaagatagtttaatagttgttttttttttttttgttgattttaattttttggaatttgtttatttggggttgtagggtaagtgtttaggatggtttttagttttgtgttggtggtgaaaattttaatgttatttttttaattaaaaaaaggggggggtaagggaggggttttgtgataattatttttagttttttttgattattttaaaattaagttgattttttttaattagtttttatttattgttttaattttttttgttgattttatttgggagtttggaattgttaggtattgttgaatgtggtgtaaaattttttttttttttttagtttgtagtgtttggagttgttggggttatttgtttgttttgatgttattgtgagatggtttttgagttttttgagagtttttagtgaaaggattttgtggtattgtttttattattatattgtaaatttttttaaattttggaattaattatatagaggatatgttttaatttgttttgtattaatgttatagtggggatggaggttaggttgtggttagagtagatatgtaggtttatgaaattgatgaattgagagttgtttttagttttgagtgtattatttggaattttagtttgaggttataattagaatttttgattttagatttaattttgtaaataataggggaaaaaaatggggaaaagaaaaattatgagagagggaaaaaaaattattttgtatttgtaaaaaaaaaaaaaaaaaaaaaaaaaaaaaaaaagttatataattttaaaatttttttgttttagataattttttttaagtattttttttgtgttttttaatttataaaagataatggaatgttttatagattggattttattttatttttttttttttttttaattgtttttagtttaatagttgttagttttattttagtgttgaatttaattatataggaataaaatattttttagtaaatttgtttgttaaatattttgttatatttattttttttttgagaaatggtttaattatagaaatttatttgtatttaggaattttttttttttttttttttttgattgttattttagtttaattgtaagtagagattttatttgtgtagtaattttatttgtgttttaaatttgtttagttaattttttttttttttttttagtaatattttgtttta

SEQ ID NO: 294 - DNA, 4001 bp, Artificial Sequence
  chemically treated genomic DNA (Homo sapiens)
aagtgttgggattatatgtattagttacggcgtttggtttaattttgttttaaaaaataaaataaaaataggtgaaattagtttttaaatattttatttaatttaatatattaaaaatgttattttattatgtaattaatttttttttttaagatagagtttcgttttcgttgtttaggttggagtgtaatggcgtgaattcggtttattataatttttatttttcgggtttaagcgattttttttttttagttttttgggattatagtttagttgggattataggtatgtgttattatgttcggttaattttgtatttttagtagagatagggtttttttattttggttaggttggtttcgaattttcgatttttggtgatttgtttgttatggttttttaaaagtgttgggattataggcgtaagttatcgtttttagtcgtaattagtatttttttttttttttttttgatacggagtttgtcgtttaggttggaatgtagtggcgtaatttcggttattgtaagtttcgtttttcgggtttacgttatttttttgttttagttttttgagtagttgggattataggcgttcgttattatgtttggttaattttttgtatttttagtagagatacggttttatcgtgttagttaggatggtttcgattttttgattttgtgattcgttcgtttcggttttttaaagtgttgtgattataggtgtgagttattacgttcggttcgtaattagtatttgtaaatgattaatttttttgtattaagtttttgaaatttagtgtgtattttgtgtttatagtatattttaatgtagatttaataatatataatagttatatatgattagtgattatagtataggatagtacgggtttagatttattagttttttttttaagagtatatttaggaattttttgtttttggttttagaatatatttaattttaagtaggtaattgtttttttttgttttgttttttttgggtgggaaggggatttttatagcgatagggagtgttttttatttaggaaaaagaaagggagttgtgggtttaatttcgtttttgaagtttgtttaagttgtagaaatttttttggttattggataaagtaattaagaatttttatattttaatcgtaacgttgaattaaattggttagaatgaaatgaattgttttaatgttaaagttaaaatttaaaattgaggagttttgtaatattaaatttattgattattttattgttatttgtaaattatagtataggtaggtcgtaaagtttattaggtagtatttaagtatataatattttagttgtgtttttttttagtttttggggttattgaagaattagttttggtatagtttattataaattaattataatcgtaaatttaaaagttttaatattaagcgtgggtaatatattaaggtttttataaaaaatttaaaaattagtcgggagtggtgttgtgtgtttgtagttttagttatttcggagggtgaggttgggaggatagtttgagttaggaaggtaggggttgtagtgagttatgagcgtattagtgtattttagtttgggcgagagtaagattttgtattaaaaagttttaatatttaaaaggattgtagtttatagtatgttatttttattgtaaattaaaaggttattttttttttttgtttattattagatatattttttttagttttattttatttgtataagttatttgggagaagtggtttttaggaagattttaaaattaatatataaatataatttttttattttattaatatattaagtttatataagagttaaataggtaaaagtagtattttaaattgtttttttttcgtatatgttagttttacgatttttagttttataaagttagggattagagattaatgtaattattaatacgtatttgtttttgagtgaatttttaatgttaattaggaagggcgtttttaaaacgacgttatttgtaatttttaggaagataaatacgggttagaatttatattttgcgggttttgaaatggaaaattttttttttagatagatttattttggtcgtaaatattaggagatttttcgattttttgttttatttttaggttaaggagttatttgtttttaattttttatttcgtttttttttttaggtggtttttcgttattcggtggagaaagcgggaatattttttcgggttagtttttgtttttttcgaacgttttattgtatttattggagaagattacggtttcgagggatcgcgataggttttaggcgaggtgtatcgagtcggcgagtattgcgtgatattgtgcgtattggaatatagcgtattttttaggttgtagttaagacggtagttgcgggtcggcggttggttttttagtttttagttttgcggggtcgagcggcgaggatttttttattatttgcgtattttattttatggaggtcgtaaaagaagtttggttaatcgtttttttagtgttattataaaagttttttcggggcggcgttgtataacgtgagcgatgtcgtagcggttgagtcgttattttttcgtagtcggcgtttttttttcgaatatacgttaggtttcgttttaagtatagtttttgcgtttttattggatattatgggtaatttaagtattggagttcgagttcgcgtattcgttatttgaataggcgttataggttttttggcgtttgcgtattcgtgaagtgtgaaaaaagcgcgtttttgttgggacgggaaattagtttttttattggttagggttagaaatttcgtttttgaggtatttttaattaatggaagcgcggtattttttatttaaattgtttataaatttttgtttagttaaagttaagagtggcgttagggatttgaatcgcgttgacgaagtttggtgatttatttttcgagtatcgtcgggatttcgaatcgcgatgattattttttttttagaggagttggatttttttaagtatagtgatttgtagaatttagttaagagtttgggttttcgggttaatttgagggtacggcgttggcggtgcgggtttttgggcgggcgcggcgggaatagcggtttcggggagatgcggtgcgaagggatcgagagggaagttcgggattgaggtagttttttttgtttttcgggtagtagatgtggtttacggtagttttagttagaattttgataaacggaagaggaattgtagtttttattttattttgaagttggtttgtttgggtgtttatatgataagttttatttcgagggatggtttattgttttttgttttgttttgttttgaaattattgtatattttttagggcgtcgattacgaaatttaggtttagaaagtataaggggtgtcgttaatcgttagataattaagtaaataattggtttagtttttggaaaattttaaatagattttagtgatttgtaatattgtcgataattttttgatattttattgatggatttgttagaaaaaaaaaatcgatttttaggggagtatttttttgggtaaatttttattgatgattgttgggttgatggtttttattaaaattagtaaggtttttgatttcgaggttataagatgtttggagagttggttcggcgttgtggtttacgtttgtaattttagtattttgggaggtcgaggtaggcggattatttgaggttaggagttcgagattagtttggtttttaaaaaattagtcgggcgtggtggtatacgtttgtgatttaagttttttgtttgtgattttagttatttgggaggttgaggtagaagaatcgtttgaatttgggaagtcgaggtggtagtgagttaagatcgtattattgtattttaatttcggtgatagagagagatttagttttaaataaaataaaaataaataaaaaatttaagatgttagaagaagatt

SEQ ID NO: 295 - DNA, 4001 bp, Artificial Sequence
  chemically treated genomic DNA (Homo sapiens)
aatttttttttaatattttgggttttttgtttgtttttgttttgtttgagattgagtttttttttgttatcgaagttggagtgtagtggtgcgattttggtttattgttatttcggttttttaggtttaagcgatttttttgttttagttttttaagtagttgggattataggtaaaaagtttggattataggcgtgtgttattacgttcggttaattttttaagggttaggttggtttcgaatttttgattttaggtgattcgtttgtttcgattttttaaagtgttgggattataggcgtgagttatagcgtcgggttaattttttaaatattttgtagtttcggagttaaagattttattggttttgatagagattattaatttaatagttattaataaaaatttatttaaggaggtgtttttttaaaagtcgattttttttttttgataggtttattaataaagtattaagagattatcggtaatattataaattattggagtttgtttggggttttttagaagttgagttaattatttatttaattgtttaacgattaacgatattttttgtgttttttgggtttgagtttcgtaatcgacgttttgagaggtatatagtaattttaaaataaaataaaataaaaaataataaattatttttcggaatagagtttattatgtgagtatttagataagttagttttaaaatgaggtgaaaattatagtttttttttcgtttattagagttttaattgggattatcgtgaattatatttattgttcgaggggtagggagagttgttttagtttcgggtttttttttcggttttttcgtatcgtattttttcgaggtcgttattttcgtcgcgttcgtttagggattcgtatcgttagcgtcgtatttttaggttggttcggagatttagatttttggttaagttttgtaggttattgtatttgagggagtttagtttttttagagaggggatgattatcgcgattcgaaatttcggcgatattcggaagatggattattaaatttcgttagcgcggtttaaatttttggcgttatttttaattttgattaggtagaaatttatagatagtttaaatgaagaatgtcgcgtttttattggttgaaaatgttttaaaggcggggtttttaattttgattaatagaaaggttgatttttcgttttaatagaggcgcgttttttttatattttacgaatacgtaggcgttaaagggtttgtaacgtttgtttaggtaacgagtgcgcggattcggattttagtgtttggattgtttatgatgtttaatgaggacgtaggagttgtgtttggggcggggtttggcgtgtattcgaaaggaaggcgtcggttgcgggaagatggcggtttagtcgttgcggtatcgtttacgttgtgtaacgtcgtttcggggggatttttgtggtggtattgagagggcgattgattaagttttttttacgatttttatggagtgggatacgtaggtggtgaaggggttttcgtcgttcggtttcgtagggttgggggttgaggagttagtcgtcggttcgtagttgtcgttttggttgtagtttgagaggtgcgttgtgttttagtgcgtatagtgttacgtagtgttcgtcgattcggtgtatttcgtttgggatttgtcgcggtttttcggggtcgtggttttttttagtgagtgtagtgaagcgttcgggaaaggtagaggttagttcgagagggtgttttcgttttttttatcgggtggcggagaattatttggggaagaaaacgggatgaaaagttggaagtaaataattttttggtttggggatggggtagggaatcggggagttttttgatatttacggttaggatgagtttgtttagaggagagattttttattttaaggttcgtagagtatgggttttgattcgtgtttgtttttttaggagttataaataacgtcgttttggaagcgttttttttagttggtattgaaggtttatttaaaggtaggtacgtattgataattatattggtttttagtttttgattttatgagattgaggatcgtggaattgatatgtacgaggagaaaatagtttgggatgttgtttttatttgtttgatttttatatgaatttgatgtattaatgaaatgaaaaagttgtatttgtgtattggttttaggatttttttgagggttattttttttaggtggtttgtataagtgaagtgaggttaagaaagatgtatttagtagtggataaaagaaaaaaataattttttggtttatagtgagaataatatattataaattataatttttttagatattagaattttttgatatagggttttgttttcgtttaggttggagtgtattggtgcgtttatagtttattatagtttttatttttttggtttaagttatttttttaattttatttttcggagtagttgggattataggtatatagtattattttcggttaatttttaaattttttgtagaggttttagtatgttgtttacgtttgatattagaatttttaagtttgcgattatggttagtttgtaataagttatgttagggttaattttttagtaattttagaaattggagaaaaatataattagaatgttatgtatttgaatattgtttggtaaattttgcgatttgtttgtattatgatttataagtgataataaagtagttagtgaatttggtattgtaaggttttttaattttgagttttggttttaatattgagataatttattttattttgattagtttgatttaacgttacggttaaaatataggaatttttagttgttttgtttagtaattaggaagatttttgtagtttggataaattttaaaaacggagttagatttatagtttttttttttttttttgaataaaagatattttttatcgttataggagttttttttttatttaaaggggataaagtaagaaggagtaattgtttgtttggaattgggtgtattttggggttagaggtagaaggtttttgaatgtgtttttggagaggaggttaatgaatttagattcgtgttgttttatattgtaattattagttatatgtagttattatatattattaaatttgtattgagatatgttgtgaatatagaatatatattggattttaaagatttagtatagaaaaattaattatttataaatattgattacgggtcgggcgtggtggtttatatttgtaattatagtattttgggaggtcgaggcgggcggattataaggttaggaaatcgagattattttgattaatacggtgaaatcgtgtttttattaaaaatataaaaaattagttaggtatagtggcgggcgtttgtagttttagttatttaggagattgaggtaggagaatggcgtgaattcgggaggcggagtttgtagtgatcgagattgcgttattgtattttagtttgggcgatagatttcgtattaaaaaaaaaaaaaaaaaaatattgattacggttgggagcggtggtttacgtttataattttagtatttttgggaggttatgataggtagattattagaggtcgggagttcgagattagtttgattaaaatggagaaattttgtttttattaaaaatataaaattagtcgggtatggtggtatatgtttgtaattttagttaggttgtaattttaggaggttgaggagggagaatcgtttgaattcgggaggtggaggttgtggtgagtcgagtttacgttattgtattttagtttgggtaacgagagcgaaattttgttttaaaaaaaaaaattgattatatggtgaaatgatatttttgatatattgggttaaataaaatatttaaaaattaattttatttgtttttattttattttttaaagtaaaattaggttaggcgtcgtggttgatgtatgtaattttagtattt

SEQ ID NO: 296 - DNA, 1301 bp, Artificial Sequence
  chemically treated genomic DNA (Homo sapiens)
tattgttattttggttcgtttttaatgagttgttgggtatattttttagacggggtggtggtcgggtagaggggttttttattttttagtaggggcggtcgggtagaggcgttttttatttttcggacggggtagttggtcgggcgggggggttgattttttttttatttttttttcggacggggcggttggtcgggtagaggggttttttattttttagtaggggcggtcgggtagaggcgttttttatttttcggacggggcggttggtcgggcggggggttgatttttttattttttttttagacggtacggttggttaggcggggggttgatttttttattttttttttagacggtacggttggttaggcggggggttgatttttttatttttttttcggatggggcggttggtcgggcggggggttgatttttttatttttttttcggtcggtacggttggtcgggcggggggttgatttttttatttttttttcggacggtacggttggttaggcggggggttgatttttttatttttttttcggatggggcggttggtttggcgggggttgatttttttttatttttttttcggacggggtggttgtcgggcggagacgttttttattttttagatggggtggttgttgggcggagaggttttttattttttagacggggtggttgttaggtagagggtttttttattttttagacggggcggtcgggtagagacgttttttattttttagacggggtttcggtcgggtagaggcgttttttatattttagatggggcggcggggtagaggcgttttttatattttagacgatgggcggttgggtagagacgttttttattttttagatgtgatggcggttgggaagaggcgttttttattttttagatgggatggcggtcgggcggagacgttttttattttttagattgggtagttaggtagaggggttttttatattttagacgatgggtagttaggtagagatattttttattttttagacggggtggcggttaggtagaggttgtaatttcggtattttgggaggttaaggtaggcggttgttttttgttttcgggtttcgcggggttcgttcgtttttttagtcgttgtttttcgggcggcgttcgtcggcgcggtggtaaagaaaaaaattatttttgtattaataaaattaaaagtaaaagtagatttgtatatataaagggtaaagtaaaattgattttttgtatatatagtaaaattgattttttgtatatataggtttatgaa

SEQ ID NO: 297 - DNA, 1301 bp, Artificial Sequence
  chemically treated genomic DNA (Homo sapiens)
tttatagatttgtatatataaagggttaattttattgtatatataaagggttaattttattttattttttgtatatataggtttatttttatttttaattttgttaatataaaaataatttttttttttgttatcgcgtcggcgagcgtcgttcgggaagtagcggttggaggagcggacgggtttcgcggggttcgagggtaaggagtagtcgtttgttttggttttttaaagtgtcgagattgtagtttttgtttggtcgttatttcgtttgggaagtgaggagtgtttttgtttggttgtttatcgtttgggatgtgaggagtttttttgtttggttgtttagtttggaaagtgaggagcgttttcgttcggtcgttattttatttaggaagtgaggagcgtttttttttagtcgttattatatttaggaagtgaggagcgtttttgtttagtcgtttatcgtttgagatgtggggagcgtttttgtttcgtcgttttatttgggatgtgaggagcgtttttgttcggtcgagatttcgtttgggaggtgaggagcgtttttgttcggtcgtttcgtttgagaagtgaggagattttttgtttggtaattatttcgtttgagaagtgaggagttttttcgtttagtagttattttatttgggaagtgaggagcgttttcgttcggtagttatttcgttcgggagggaggtgggggggggttagttttcgttaggttagtcgttttattcgggagggaggtgggggggttagtttttcgtttggttagtcgtgtcgttcgggagggaggtgggggggttagtttttcgttcggttagtcgtgtcgatcgggagggaggtgggggggttagtttttcgttcggttagtcgttttattcgggagggaggtggggggattagtttttcgtttggttagtcgtgtcgtttgggagggaggtgggggggttagtttttcgtttggttagtcgtgtcgtttgggagggaggtgggggggttagtttttcgttcggttagtcgtttcgttcgggaggtgaggggcgtttttgttcggtcgtttttattgggaagtgaggagtttttttgttcggttagtcgtttcgttcgggagggaggtggggggggggttagttttttcgttcggttagttgtttcgttcgggaggtgaggggcgtttttgttcggtcgtttttattgggaagtgaggagtttttttgttcggttattatttcgtttgggaggtgtgtttaatagtttattgagaacgggttaggatgataatg

SEQ ID NO: 298 - DNA, 3001 bp, Artificial Sequence
  chemically treated genomic DNA (Homo sapiens)
aataataaaagatttagaatattttataaattttgttgataaggtagtggtaagattttagagaattaattttgaaggaagttttgttgtggatgaaatggtattatatagtattatatgttatagagaaattttttatgaaaggaagtgtttatcgatgtagtattgttgttttattttaggaaattgttatagttattttaacgtttagtaattattattttgattaattagtagtatggaggtaagattttttattagtaaaaagattatgatttgttgaagatttagatgattatgttaaattaagtttagtataaagttgtttttttatgtattttaagtttagattaataatttatttttttttttttttttttttttttttttttttttttttttttttttttttttttttttttttttttttttttttttttttttttttttttttttttttttttttttttttttttttttttttttttttttttttttttttgagacggagttttgttttgttgtttagtttggagtgtagtggtacgatttttatttattgtaatttttgttttttagtagagagaattaagagatttttttgtttttattttttgagtagttgggattataggttcgcgttattaagttcggttaattttttgtatttttagtagagatagggttttattatgttggttaggttggtttcgaatttttgattttaaatgatttgttttcgtttttttattaaagtgttgggattatagatgtgagtttttgtatttggtttaatagtttttttatatatagtgaattgtagataattataattgtaaatgtgtaaagagattgtaattttgtaataagtagcgagttttagttaattatagtagcggagttttggttaattataggtggttaattgtttaaatagtgtttaaaatagttagaggttgagttgtaattaatttagttgtttttatatttgattgtaatttttgtaagttatttttttttttttgtttataaatgttatttgaatatatggtagttcgaattattttgaatttattttggttttagggattattggattttggatttattttttggttaatttaattttgtaaagtttaatttgtttaaagattttttgggtcggatatagtggtttacgtttgtaattttagtattttgggaggttgaggcgggaggatcgtttgagtttaggagttcgagattagtttggttaatatagcgagatttcgtttttatttataaataatttagttaggcgtggtggcgcgtgtttgtagttttagttattggggtttttatttttcgtggtaatatattttggagagggggaggtatttttgtttttgttgggtgggagaacggttagtgggtaagggaggacgaaaatgagaattgtgattgttagagggtacgttaattttaggaagagaacgtaagaaagttgggttttgtggagatttggtatatttacgttatttggaaaattattacgtgtttttcggggtaagattaaggttttaagttatttttcgtagtttagtggatttttcggttattttttttacggttttatagcgatcgcgagtcgttgtttcggtgagaatttttcggtattgtgcgcgttttcgtttgtcgtgcgcgttcgtttttttgggattcggcgtcgcgcgcgttttcgtcgcgttttcgtttttttcggttcgggagatttgatttttttggcgggcggaagcggttataattcggcgatcgaaaagatttttaggaacgtcgtattagtcgcgttttttaggatagtaggtttttgtttttttgtcgggcgtcgtttagtcgtgtttttcgttttttaggttagttttttcgtttgttcgtcgtagtcgtagttgatggttggggtttgggttgtgcggggcgtagcggtttaaatttagtttgtttttggttttcgggagattggaggattttatcggagtttcgcgttttattagttttgttttttggataagatatttgattttttcgattcgcggttttttttttcgtaagtggggataatgatcgtgtttatttaatagggttattgaagaggtgtttaggttaagcgtttgttatttaggaggttgcgatagacgtgaatttttatttttcgtttttagttttcgtgattttttttcgcgaaaaaagttgatagaagggtttcgagttttttttgtttgtataatttagtttattggggtagtgtaataaaaaaggagatgtgttattattatttttttagagtttaaatttatttttttttattatttttttagagtagtggttttagaggtttatattaaaaggggaattttttttttttttttttaagacggagtttcgtttttgttgtttaggttggagtgtaatggcgcgatttcggtttatcgtaattttcgttttttaagtttaagcgatttttttgttttagtttttcgagtagttgagtttatagatattcgttattacgttcggtttattttttgtatttttagtagagacggggttttattacgttggttaggttggtttttagttcgtgtttttaggtgattcgttcgttttggttttttagagtgttgggattataggcgtgagttattacgttcggtttaaaaggggaatttttatcgaatgttgtattagtaataggagtagtaggattgtttttattaagaaatttggtgtagggttgtgggagttggaaagggtagatttagggaaggttgtttaagagaggaattaggtttttagtatttaggacgggtaattatttttggtattttttttttgttagtggaatgaggtgagtattaggagtttggattgttgtttagaggttagtgtttttaattttggtttaaattttggtttttgttttttatggagtttggttagaaaattagaaaaattagaaaagttt

SEQ ID NO: 299 - DNA, 3001 bp, Artificial Sequence
  chemically treated genomic DNA (Homo sapiens)
gggtttttttgatttttttgattttttagttagattttatgggaaatagaaattaaaatttaaattaaagttaggaatattggtttttaaataataatttaggtttttgatatttattttattttattaataaaggagaaatattaaaggtaattattcgttttaagtgttagggatttgattttttttttgggtagttttttttgagtttattttttttagtttttataattttatattaggttttttggtgggagtaattttgttgtttttattattgatatagtattcggtgaaaattttttttttaggtcgggcgtggtggtttacgtttgtaattttagtattttgggaggttaaggcgggcggattatttgaggatacgagttggagattagtttggttaacgtggtgaaatttcgtttttattaaaaatataaaaaatgagtcgggcgtggtggcggatgtttgtaagtttagttattcgggaggttgaggtagaagaatcgtttgaatttgggaggcggaggttgcggtgagtcgagatcgcgttattgtattttagtttgggtaataagagcgaaatttcgttttgaagaaaaagaaaaaaaattttttttttagtgtgagtttttgaagttattattttggggagatgataggagaggatggatttggattttgaaaaggtagtgataatatatttttttttttattgtattgttttagtaaattgagttgtataaatagaaaaaattcgaaatttttttgttaatttttttcgcggggaagagttacggaaattggaaacgggaaatgggaatttacgtttatcgtagttttttaggtggtaaacgtttagtttgaatatttttttaataattttgttaagtagatacggttattatttttatttacggagaagaaaatcgcgggtcggaaaggttaaatattttatttagggaatagggttggtaaagcgcggggtttcgatgaaattttttagtttttcgagagttaggagtaaattgggtttgggtcgttgcgtttcgtatagtttagattttagttattaattgcgattgcggcgggtaggcgggagaattgatttgaggggcggagggtacggttgagcggcgttcgatagaaggataggggtttgttgttttgagagacgcggttggtacggcgtttttaagaattttttcgatcgtcgggttgtggtcgttttcgttcgttaagggaattaaatttttcgggtcggaaggggcggggacgcggcgggggcgcgcgcggcgtcggattttagggaagcggacgcgtacggtaggcgggggcgcgtatagtgtcggggggtttttatcggggtaacggttcgcggtcgttgtggagtcgtgaaagggatggtcgggaggtttattgggttgcgaggggtgatttgaggttttggttttgtttcggagggtacgtgatgattttttaggtggcgtggatatgttaagtttttatagaatttaatttttttacgttttttttttaaaattgacgtgttttttggtagttatagtttttattttcgtttttttttgtttattggtcgtttttttatttagtaaagataggaatatttttttttttttaaaatgtgttgttacgaggaataagaattttagtagttgagattataggtacgcgttattacgtttggttaaattatttgtgggtagagacgggatttcgttatgttggttaggttggtttcgaatttttgggtttaagcgattttttcgttttagttttttaaagtgttgggattataggcgtgagttattgtattcggtttagaaaatttttagataaattaaattttatagagttgaattgattaaagaatgagtttaaaatttagtaatttttggaattaaaataggtttagagtgattcgggttgttatatgtttaaataatatttatggatagaaaaaggaaaatgatttatagaaattgtagttaagtatggaaatagttggattggttgtaatttaatttttgattattttgagtattgtttaaatagttggttatttgtgattggttaaaatttcgttgttgtgattgattgagattcgttatttgttataaggttatagtttttttatatatttataattgtagttgtttataatttattatgtatggagaaattgttaggttaggtgtaaaggtttatatttataattttagtattttggtgggggggcgggggtagattatttggggttaggagttcgagattagtttgattaatatgatgaaattttgtttttattaaaaatataaaaaattagtcgggtttggtggcgcgagtttataattttagttatttaggaggtagaggtaggagaattttttgattttttttgttgggaggtagaggttgtagtgagtagagatcgtgttattgtattttaggttgggtaatagagtaagatttcgttttaaaaaaagagaaagagagaaagagagagagaaaagaaagaaaggaagagaaggggaagggaaggggaagggaggggaagggaggggaagggaagggaagggaaaggaaaggaagggagagaaagggagagagagaaagaaataaattgttagtttgaatttaaaatgtataaggaggtagttttatgttaaatttaatttaatatggttatttgaatttttagtaaattataatttttttgttggtggagggttttgtttttatgttgttgattgattagggtggtggttgttaaacgttgggatggttgtggtaattttttaaaataaaataataatgttgtatcgatggatatttttttttatgaaagatttttttgtagtatgtgatgttgtgtgatattattttatttatagtaggattttttttaaagttagttttttgaaattttgttattgttttattaataaagtttatggaatattttaaattttttgttgtt

SEQ ID NO: 300 - DNA, 2501 bp, Artificial Sequence
  chemically treated genomic DNA (Homo sapiens)
tttgtaaattttttcgaggtaagtaagtatttttttaataagtattatttgggggtgtgtttatggtggggggatattggtttatataggtatgtatattcgtgtatataaagtatatagagaaatggtggagatattttcgtgggttatgtttgtttgtagtttaatataattatgtattattttattgatggtaagataattataagttatttgataatattaagtattttttattttaatacgttgtagtatttttgaatttttaaaatttattataatgtaagttttaatttgagagtaggagaaataagaatatatattgagtatatgtattttcgtgaggatgtgtttgtggaaggtgtatatataagtttatttttatatataattatgtatatatatataaaaattaaatatatgatatttgaaatacgtttaaatattggtttttgttttttgtaagaggtgtttagtgggattttgtttttttttttttttatttgaagataaattttttgttagagatgagttttggtatatagttttttaggtagagggtgtgtggtaggtttattgtataaatattagttttgttagattttgttgtatttattgtttgttattttagattaatttttgagaagttttaaaatttattttaacgattttgtggagtttagtttattatattttagatggttatttattttatttatgatatgtttagtagtagtttggagggagagttaatgatagtagggagggtggggtttatattttggttagatttattgtttattgtatttggttttgtgtaggtttagggtagtgagtttgagtttatttggaatgttggttaagtaggttatattatttagtgggaagagagagttttttttagagattttgtagatttttaggattaagttatttttaggaatgaattaaaaatggaagagatggttttttgggggtaagtagttttttggagattttatttgaattatatttttaggtgattatagcgtagttatagtagttataaagatatgtttataaagattttaattgcgttatgttattggggtgaaaatatagtaataaattagtttttttagaaagtatttaataatattagtagttgaggttttaagaatatggattttttaaggtggtggttttgtagataatattttttttttttttcgtttttttattatagaggattaattttaggtggtttagtttttttgatatttaggaggaaggttttaggatggtatattgtttaatattatatattgagttttttagatttggtttaggtatgtgtattgattgttgggtgggttggttaaaatatttttagaagtatatatggtattttagtttataaattacgtattacgtagttgtaattgttaatagtatttcgtttttttgatggttttttgttttgttagtttttgagggtatagagaatataaggttgtttgtatttttaattttttttaaggttttttagggaaagagaaggagaggtgggagtagtttttttgggggttgttgtcgggttgtttagagtttatagattttggttttagttttatacgaggttgacgatttattttggttatggaaagataagagttagagttatttttttagaggttgatgtgtttaattaatgtttgatttaattggagtagggtttagagagtggggttagatggttttagattgaagtttaattaatttgtttagttaattgttttaatttattgggttggggataggaggaaggtagaggtgatgaatggtttaaagagaataggaaggaggaggtgtgtggaaaaggttttttataagtttataaatatataaaaataaaaagtatattttttaaataaaaatgattatatttttatttggtaaaaaattgtatatatatgatttaaattttttttaaattttaatagtttttggtaattttaataaagtataatatattataattaaattaaaaaatagttgtttaagtaatagtcgttaagagtgatgtgatttttgatgtttagtttttttttttattttattttatttttaaagatagagagaaaagaaaaatttttttattttgataattcggttttttttttttttaggaagttagttaataggaagtaatataataagtaaggagtgttatgggaagttataggtcggttttgtattagtaggagtagtcgttttcgttggtcgggggtttttggggtttgtttagtttgatgtcgattattgtagggggacgggttaaggaagatgatttttttggataagttgttattttatttagttttgtgtattgtattttttggttattgttttgtttttttgtaaatatttagggatttggtttttggtttggttgggttaggaaggatgtaatattaattttattttgtttttttttttttttattcgtttattttttttag

SEQ ID NO: 301 - DNA, 2501 bp, Artificial Sequence
  chemically treated genomic DNA (Homo sapiens)
ttgggggaagtggacgggtgaagggaagaggaggtaaggtggagttggtattgtattttttttagtttagttaaattaagagttaagtttttaggtgtttgtagagaaatagagtagtagttaaagggtatagtgtatagggttaagtggggtggtagtttgtttaggagagttattttttttagttcgtttttttgtagtgatcgatattaagttggataaattttaggagttttcggttagcgagggcggttgtttttgttaatgtagagtcgatttgtggttttttatgatattttttgtttgttgtgttgttttttattggttagttttttaaggggggagggaatcgagttattaagatgggaggattttttttttttttttgtttttaggagtagggtgggatggggagggaggttgggtattagggattatattatttttaacggttgttatttaaataattattttttggtttggttgtaatatattgtattttattaagattgttaaaaattgttaaaatttaaaaaaaatttaaattatgtgtatataattttttgttagataaaaatgtagttatttttatttgaaagatgtgttttttgtttttgtatatttgtaaatttatagagaattttttttatatatttttttttttttgttttttttgaattatttattatttttgttttttttttatttttagtttaataaattaaaataattaattgagtaaattaattaggttttagtttggggttatttggttttattttttaggttttattttagttaaattaaatattggttgaatatattagtttttgaaaaggtagttttgatttttgtttttttatggttagagtgggtcgttaatttcgtgtggagttgagattaaggtttgtgggttttaggtagttcggtagtagtttttagaggaattgtttttatttttttttttttttttttgaaaagttttgaagggggttgagggtataggtaattttgtgttttttgtgtttttagggattggtagagtaagaggttattagaaggacgaggtgttgttggtaattgtagttgcgtggtgcgtggtttatagattggggtgttatgtgtatttttgaaaatattttaattagtttatttagtagttagtatatatgtttgggttaagtttaagaaatttagtgtgtgatgttgggtagtgtgttattttgaagttttttttttggatgttagggaagttggattatttggagttgattttttgtgatggggaggcgggggggggggggggtgttgtttgtagaattattattttgaaagatttatgtttttagagttttagttgttaatattgttgagtgttttttggaaaagttgatttgttgttatgtttttattttagtggtatggcgtagttgaagtttttgtggatatatttttgtggttattgtggttgcgttgtggttatttgaggatgtggtttaggtggggtttttagaaggttgtttgtttttagagagttattttttttatttttgatttatttttgagaatggtttagttttgagaatttgtaaagtttttgaagagaattttttttttttattaagtgatataatttatttggttagtattttaaatagatttagatttattgttttgagtttgtatagagttaggtgtaatgggtagtgagtttggttaaaatgtaaattttattttttttgttgttattggttttttttttaggttgttgttgggtatgttatagatgggatgaatgattatttggggtatggtgggttgaattttataaggtcgttggaatgaattttgaaattttttagaaattaatttgaaatggtaggtagtaagtgtagtagaatttggtaggattgatatttgtgtagtgggtttgttatatattttttgtttaggaggttgtatgttagagtttatttttagtaaggaatttatttttaggtgaagaagagaggaagtaggattttattgagtattttttgtagaaggtaaggattaatgtttgaacgtgttttagatgttatgtgtttagtttttatatgtgtgtatataattatatatagagatagatttgtgtatatattttttataaatatatttttacggagatatatgtgtttaatgtatatttttgttttttttgtttttaagttggaatttgtattgtgataagttttggaaatttaaaagtattgtaacgtgttgaaataagaaatatttaatattgttaaataatttgtgattgttttgttattaataaaataatgtatagttgtgttaaattataggtaaatatagtttacgggaatatttttattatttttttatgtattttatatgtacgggtgtgtatgtttgtgtgggttagtgtttttttattatgggtatatttttaagtggtgtttgttggaagagtgtttatttatttcgagagaatttatagg

SEQ ID NO: 302 - DNA, 4001 bp, Artificial Sequence
  chemically treated genomic DNA (Homo sapiens)
aattttgtaggtttaaattatttttttattttagttttttgagtagttgggattataggtgtgtgttattataattagttaatttttgtattttttttattagtttcgttatgtttttttggttggtttcgaatttttgagtttaagtattttagagtattttttaaagtgttgggattataggtaagagttattgcgtttagttagttttaaagtttagaattttttttttaaaaattttttttaaaagttttaaattttgaaatatttggttgttagggttttagataagagattgtggattaaaaattaagatgttttgaaaagtgtttttttttgttttttttttgtgttatttttaggttatgtaggaaaatgggaaattatgttggatttaatgttaaaaaagttagattttttgttttttttatttattttgttgttgttagttgagataggattttattggagtatagtggtatgattttggtttattgtagttttgattttttggtttcggtaatttttttattttagttttttaaatagttgggattataggcgtttggttaatttttttattttttgtagagataagagttttgttatgttgtttaggttagttttaaatttttgggtttaagcgatttatttgtttcggttttttatatttgtattttttaaagtatatttttaagtttagatgaatttaagtttttgtagttagaaattggtagaattggtgtttgaaattttttattttttagtgtttaaattttttattattgtaagatattttttgtgtgggttttttttgtggaaattatatttggagatttttattttttaattttaagtttttttatgatatttatttaggattagttttgtttttttgttgaaggttttaagagatttgttttttttttttcggtagttgttagtatttttattattttatgagtttttttttaagtttggttgtgaaatgtgatatttattagttttcgtagtattttttttttaatttttttgttatatttgatgataattttttaggttttttatatttttaggattttgttattaattattatagggataagtaaaagtaatatatataaaataattgtataatagaataatatagggtagttatatagaatgatttttgttgtttaattttggaaaatgtgattttcgaggatttatattttaatttttgttttttatttttgaggatggagttatcgttttttttttttggttatatatttagatgtattttaggtttgatgatagttgtaatgtaaaaaagaatagtaaggtttttggtttttgtagataatttggattagataatttttagattgggtaatattcggtttattagtgttattggatgggaagttttgattgagttgtttgggtttttggcgtgttgaataaagaattgaataaaacgtagaaataaagtaataaaagaagtaacgaaagataaaataataaaagaacgaagtaataaaagtataaatttattgaagcgaattaagtgttttaagagttttaattgtagtgtttttaagggttattaggttaaaagaatttggtaaatttttaggtgttttttatagtcgtttaattggttgtattttatgaaggattggtttgcgattaattagaggttgaaatggagatggtcgaggataattagaggcgatgtggaaatttttgttttgtaattataggagtgaaggtgtggtttgtatgttgtttagttttgtttagaaattgttgtatttgttgtttttttgtttatgttttaatttttggttattttaattttttatttttttgttttattaggtttttattttgattaaaaatgtatttatttagttgggataaattttatattgtatttgttttatttagatgagtattttagtagagtatatggtatatgagtaggtatttaaaaatttaatatatagtatattttgttatttatgtgttaggtgtcgggtaggttgagttaatagttgaatagaaatttatttatttaacgtgttaatttttatatagtatggtcgtgtatttaaattaaatggaaagcggtatgggagatttggaaaggttttttgtgggtggtatttgattatttaaatttttattttagttttatttattgattttgatatttggaataagtagttttttagtgtttgtttttttattggtaggtaaatgggttaatgacggtatttttggtattagatttcgttaattaatgaaaagtatatagaagaaaatagtttggttttttaagtgggtagtgcgatttttaaggacggtatttcgtttgatagtttttttttaggttgagaagttagagtaaatttatttgatttttttattatatagtgttttttttttagatgagtttaaagttttaagtttatttagttttgtttagacgcgtttgtttatttttaataggtttattagagaggcgggttttttaaagtttggtacggtttattgtaggtgacgttttttgttttttagcgtttttaggtttttggggtttattttttttttttattcgatttcggaattttttttcgcgttttgttcgggcgtttggttgtttggggtagaggtttttcgttatacgcgcggtttcgtttcggtttttacgtgatttggcgtgcggagcgcgtacgcgggaattcgcgttggaggcgggcgagggtcgaggggtagttagggagcgcggtttgaggagggcggggtcgtttcgtaggttcgttagtgtttttagttgttttcgcgcgttaaagttaaatttcgatattcgtcggcgggtcggtgagtttattagttgattcggtaggttaggatttggtttagcggcgtcgcgagttttagtgcgcgtattcgtggtcgttttttagttttttttgtcggacgagttttgggtcgttataagattaaggaatggttatttcgtttaagagaagttgttcgttttttttagttagttttgaggggattcgtattaagaaaatttttatcgaagggaatatcggtaaggagttttcggaaatgtgggacgtaaggttggggtgtcgcggtagtggttgaagttttttttcgtcgtatttttttgtagtaattcggtgagggttttttttttagtttggcggtgtggacgcggtttcggtttttttttttatttagagtattttttttttatttttcgttttacggggtgattgcggttttcggggttagattgggcgttaggtttgcggtttttgtgaggcgcgttttgaatttttgttttttttttgttgggaattcgtaaagggaagcgggggaagggtattagattttttgaggtgtaatttatattaaatttattttttttaggtgtatttttttatgaggtttgataaatattatgttttttgttattattatgatcgagatatagaatatttttattattttagaaagtttttatttgtttttttgtatttagttttttttattttttttattttttggtatttattgatttgatttttatttttgtaagtgttgttttttttagaatgttatataaatggaattataggttatatcgttttttgtgtttggcgttttttatttagtataatgtttttgaaatttatttatgttatttgtgtttgtagtttgtttttttttattgttgagtagtattttattgtatggatgtattatcgtttatttattttttagttgtggattttagggttgtttatagttttttagttatattattagcgaagtattgttttagttatattattaacgaaattcgaaatattcgagtataagtaaagaggtttttaatgattttaatagtatggagttttttattttttattttatatttaagtaaatattggattatgatttaaagattattaacgtttttgttaatttagatg

SEQ ID NO: 303 - DNA, 4001 bp, Artificial Sequence
  chemically treated genomic DNA (Homo sapiens)
tatttgagttaatagaaacgttagtggtttttgaattataatttaatgtttatttggatgtggagtaaggggtgaggaattttatgttattaagattattaaagatttttttgtttgtattcgaatgtttcgagtttcgttaataatatagttaaaataatgtttcgttaataatatagttaaaaaattgtaaataattttgaggtttataattagaaaatggataaacgatggtatatttatgtaatggaatattatttagtaataaaaagaaataaattatagatataagtaatatgaatgaattttaaaagtattatgttaaatgaaagacgttagatataaaaggcgatatagtttatgattttatttatatggtattttggaaaaggtaatatttgtagggatagaaattaaattagtgggtgttagggaataggaagggtggagggggttgaatataaaggagtaggtaggaattttttaaggtgatgaaaatgttttgtatttcgattatggtgatagtaaaaggtataatgtttgttaaattttatagaagagtatatttaaaaagggtgaatttaatgtaagttatattttaagaaatttaatatttttttttcgtttttttttgcgagtttttaataaagagggagtagaggtttaaagcgcgttttatagagatcgtaggtttggcgtttagtttgatttcggggatcgtagttatttcgtggagcgggaggtaagggaaggatgttttgggtgggaaaggaagtcgaggtcgcgtttatatcgttaggttggagggaaagtttttatcgagttgttgtagagagatgcggcgaagggaagttttagttattgtcgcgatattttagttttgcgttttatattttcggaggttttttatcgatgtttttttcgatggagatttttttgatgcgggtttttttagagttggttgagaaagacgggtagttttttttgggcggggtggttattttttagttttgtggcggtttagagttcgttcggtaaagagggttgggaggcggttacgggtgcgcgtattggagttcgcggcgtcgttaagttagattttgatttgtcgggttagttagtgagtttatcggttcgtcggcgggtgtcggggtttgattttggcgcgcggaggtagttgaggatattggcgggtttgcggggcggtttcgttttttttaagtcgcgttttttagttgtttttcggttttcgttcgtttttagcgcgggttttcgcgtgcgcgtttcgtacgttaggttacgtgaaggtcggggcggggtcgcgcgtgtggcggaaggtttttattttaagtagttaggcgttcgggtagggcgcgggaagaggtttcggagtcgggtggggaggaagggtggattttagaggtttgagggcgttggagggtagagggcgttatttgtagtgggtcgtgttaggttttggaaaattcgtttttttagtgggtttgttggagatgaatagacgcgtttggatagaattggatagatttaaagttttgaatttatttggggagaaggtattgtgtggtaggaaaattaaatggatttattttggttttttagtttagaggaagattattaggcgaagtgtcgtttttgggaatcgtattgtttatttagagagttaggttgtttttttttatgtgttttttattaattaacgaagtttagtgttagaaatatcgttattagtttatttatttgttagtgggaaaataggtattgagaggttgtttgttttaagtgttaaagttagtaagtgaaattgggatgggaatttaggtagttagatgttatttataggaggtttttttagattttttatatcgttttttatttgatttggatgtacgattatgttgtatagaagttagtacgttgggtaggtaggtttttgtttagttgttaatttagtttgttcgatatttggtatataggtaataaaatgtattgtatgttgaatttttgaatgtttatttatgtgttatgtattttgttagaatatttatttagatgggataaatgtagtgtaggatttgttttagttagatgagtgtatttttagttagggtaaagatttaatgaggtaagagaatagggaattagggtaattaagggttaaggtataagtaaaagaatagtaggtgtagtaatttttaggtaagattaggtagtatataggttatatttttatttttgtgattataagatagaagtttttatatcgtttttgattgttttcggttatttttattttagtttttgattggtcgtaggttaattttttatagggtgtaattaattggacgattgtaaagggtatttagggatttattaaatttttttagtttagtaatttttaagaatattgtaattgggatttttgaagtatttggttcgttttaataaatttgtgtttttgttatttcgtttttttgttgttttgtttttcgttgttttttttgttgttttgtttttacgttttgtttaattttttgtttaatacgttaaaaatttagataatttagttaagattttttatttagtaatattaataaatcggatattatttagtttggaagttatttggtttaaattgtttatagaaattaaaggttttgttatttttttttatattgtaattattattagatttgaaatgtatttaaatgtgtagttagaaggggaaaacggtgattttatttttagaaataaagagtagaaattaaaatgtgaattttcggggattatattttttaggattaaatagtaagaattattttatgtaattgttttatattattttgttatgtaattattttgtatatattatttttatttatttttatagtgattaatagtaagattttaggaatataagaggtttgaagagttgttattaggtatagtaaggaagttgggagaaaggtgttgcggaagttaataggtattatattttatagttaagtttgggggaaaatttatgaaatggtaagagtattggtagttatcgagaggaggaaggtaagttttttgagatttttaataggaaagtagagttggttttggatggatgttataaagaggtttggggttaaggagtagaaatttttaagtgtggtttttataaaaaagatttatataagaagtattttataatgatgaagagtttaagtattggaaaatgaaagattttaaatattagttttattagtttttggttgtaaaaatttgaatttatttgagtttaagagtatattttgaaaaatataaatgtgggaggtcgaggtaggtgaatcgtttgagtttaggagtttgagattagtttgggtaatatggtaaaatttttgtttttataaaaaatagaaaaattagttaggcgtttgtagttttaattatttgggaggttgaggtgggagaattatcgaagttagggagttaaggttgtagtgagttaagattatgttattgtattttagtgagattttgttttaattaataataataaagtaaatgggggaagtaaagaatttagtttttttggtattaagtttagtataattttttatttttttatatgatttgggggtaatataaggagagaatagagaaaagtattttttaaaatattttgatttttggtttataattttttatttaaaattttggtagttagatgttttagaatttaaaatttttagaaaagatttttagaaaagaaattttaaattttggaattggttggacgtagtggtttttgtttataattttagtattttgggaggtattttggaatgtttgagtttaggaattcgagattaattagggaaatatggcgaaattaatagaaaaaatataaaaattagttggttgtggtggtatatatttgtggttttagttatttaggaggttgaggtgggaggatggtttgggtttgtaaagtt

SEQ ID NO: 304 - DNA, 2501 bp, Artificial Sequence
  chemically treated genomic DNA (Homo sapiens)
ttataggaaaaaaatttattatcgatgattttatttgtgtgttgggaataagtaaaagaaacgttattttttaatttgtggtagagttgaagaagtaaacggattttgagtaagttggttgggttttttgaggtaataagattttaatgtgagtacgggataggggaatggttattgttgttgttgtcggtaatttatttaggggtttgaggaattggtttttttgaagtttagttaaaaaaatattaggttttggttgggcgcggtggtttatgtttataattttagtattgtgggaggtcgagataggtggattataaggttaagagatcgagattaatttggtttatatggtgaaattttatttttattaaaaatataaaaatgagttaggtatggtgatgtatatttgtagttttagttatttaggaggttgaggtaggagaaatcgtttgaattcgggaggtagaggttgtagtgagttgagattgtattattgtatttaagtttggcgatagagcgagattttattattgggttttcgggaataattttaaataatggttttatttgattttgaaattggttttattatttagttgatttagtcgattttataaattttgtgtttttggtaagatcgttcgttgtgttggttaggcggaggtatttttcgttagtgattgtaggttttattgttgtttttttttatttttataggtataggatttttaaagaatagtggtggtttaagttacggttttttatgaaaattttggttaagtataaggttagttatgacgtgtcggatttaggttagttggaatatgtgtagttttggagtgtttgatttagtttcgtttgtatgtgtttgtagttatcgtggattgtttgtttttgtaatatttaagttattttattagtattttatgtacgtattattgatattaatatttaatcggcgagtgtttatttgttttatttgttttagtgcgtgttgtttgtggagtgtgttttatgtttttagatgtgtatatgagtagaattaattaaatatttgtttatgattttaatagttttttgttttagttttttaagtaggagattagtattttaatttatgggtggttattaaaggtttttttagttttgtgggtaaagattagtaaaatatttttatagggattattgaattatgtatacgttatataaggagaataaagttaggagtttatataggttaaggggaaggttacgtttatttattattttatatttgttatgtgttagtttttatttatagtagtaggtcgggattttgggtttcgattttaggtttttgtttttttttgaaagtaaaatatgaattttagttatttgtttttttgattgtaattttagttgtatgttaaaattattaaggggtgggtggggcggaggtgggtttaaaaatttgatagttagttttttttttaggttaagttatagttttcgttgggatttaggttggaatttttcggaagatttttgttagagtagatacggttgttgggatgatagttttgttgttttggtgggttttttttttgtagggatagcgtttttgttttttagttttagtttgtaagagagaatagttgcgttttagaaatgggggtagagagttgggtggagggagaggagaggttaaaaataaattttgtttgggaaattagagttcgatagttaagaaagagttagcgcggaggtttttttttttggttttgtaacgatgaagtaagcgtttatttattttaatttatttgttttttaggacggtttttatgtagtcgtcgcggtgaattttcgtttggtggatatttttttagggtttcggtgtgatggagttttttgaattagcgtaggtagacgtgggatatttttgtgtatttttttattttatttttgtttttaaataaaggttttaaatgttgtttaaaataatgatttaagtagaggttaagttagagttgttttttatttttagatttttaaatattttagaatgaggtaaaacgagtttgttagtataaagtgaaaattttatatggtgtatttttggcgttttatgtatgattattttaatgaatttttttttggttatttttaagatagatttgagtttttgattcgttagttaagggttttggcgatatttaatgatataatatttttggaaaaagtagtagtatttttgattttttatatttagttcggaggtgtattgtttcgggtttttgtgtagtcgagcgttacggttgtttattggatgatttaggatgggtttttggtaattttcgggttttcgggttcgaggatggttaggtcgtgtgtgttttttttagtgtcgaggtatttgagaggaaggtaggcgtggttagtaaggattggtttttgcgtgagcgttgttagagttagtacgagggtttttagttttagacgttgtttttttcgttttttat

SEQ ID NO: 305 - DNA, 2501 bp, Artificial Sequence
  chemically treated genomic DNA (Homo sapiens)
gtggggagcgggggagatagcgtttgggattggaagttttcgtgttgattttaatagcgtttacgtagaagttagtttttgttgattacgtttgttttttttttagatatttcggtattgggaagagtatatacggtttggttattttcggattcgagaattcgaaaattgttaaggatttattttggattatttaatgagtagtcgtggcgttcgattgtataggagttcgagataatatattttcgagttgaatatgaaaagttagaaatgttattgttttttttaagaatattatgttattgagtgtcgttaaagtttttgattggcgagttaaaaatttagatttattttaagagtgattaggaagaggtttattgaaataattatgtatgaagcgttaaagatgtattatgtagaatttttattttgtattggtaggttcgttttattttattttagaatatttaagaatttaaaaataaagggtaattttgatttaatttttgtttgagttattattttaagtagtatttagggtttttatttaaaaatagaagtaaaatgaaaaggtgtataagggtgttttacgtttgtttgcgttgatttaggaaattttattatatcgaggttttgggggagtgtttattagacgggagtttatcgcggcggttgtatggaaatcgttttgagaagtaagtgggttggggtgagtaagcgtttgttttatcgttatagagttagaaaggaaagttttcgcgttagtttttttttggttgtcggattttgattttttaaatagagtttgtttttggttttttttttttttttatttagttttttgtttttatttttgaggcgtagttgtttttttttgtagattagagttaagaggtagaaacgttgtttttataggaggggggtttattagggtagtagggttgttattttagtagtcgtgtttattttggtaggagtttttcggagagttttaatttaggttttagcgaggattgtggtttggtttggaggagaagttggttattagatttttgaatttattttcgttttatttattttttggtggttttaatatgtagttaggattgtaattaagaggataagtaattaagatttatgttttatttttaaaggagagtaggagtttggggtcgaggtttagggtttcggtttgttgttgtggatggaaattgatatatggtagatatggaatggtgagtaaacgtggttttttttttggtttgtgtgaatttttggttttgttttttttgtatgacgtgtgtatagtttagtgatttttataaaaatattttgttaatttttgtttataaaattgagaaaatttttagtagttatttatagattgaggtattaattttttatttaaaaaattaaaatagaggattgttggagttataggtaaatgtttaattaattttgtttatatgtatatttgaaagtatgagatatattttatagatagtacgtattggagtaggtggggtagatgggtattcgtcgattaggtattaatgttaataatacgtgtataaagtgttgataaaataatttaagtgttataaaaatagatagtttacggtggttgtaggtatatgtaggcgggattgggttagatattttagggttgtatatgttttagttggtttgagttcgatacgttatagttggttttgtatttggttaggatttttatgaggggtcgtagtttgagttattattgttttttgggaattttgtgtttgtggaggtaagaggagatagtagtgaggtttgtagttattggcgggagatgttttcgtttggttagtatagcgagcggttttgttagaaatatagggtttgtagggtcggttgaattaattagatgataaagttaattttaggattaaatgaaattattgtttaaaattattttcgaagatttagtggtggagtttcgttttgtcgttaggtttgagtatagtggtgtaattttagtttattgtaatttttgtttttcgggtttaagcgattttttttgttttagttttttgagtagttgggattataggtgtgtattattatgtttggtttatttttgtatttttagtagagatggggttttattatatgagttaggttggtttcgattttttgattttgtgatttatttgtttcggttttttatagtgttgggattataggtatgagttatcgcgtttagttaagatttagtatttttttaattgagttttagaaaagttagttttttaaatttttgaatgagttgtcgatagtaatagtaatggttatttttttgtttcgtatttatattggggttttattgttttagggaatttagttaatttatttaaaattcgtttgtttttttagttttgttataggttgaaaaataacgttttttttgtttatttttagtatataaatggaattatcggtggtaaattttttttttataa

SEQ ID NO: 306 - DNA, 4001 bp, Artificial Sequence
  chemically treated genomic DNA (Homo sapiens)
ttatggatagttcggagtttaaggtttttgggtgagtagatagtcggttaaaggttagtttggagttaaagagattagatttttgtttagattgttatattcgtattattttaaatttgttttttttatattttgttatgggggaagaggtgtcgtttttttttagtgtttttttttttaggatttttttattttgggtttagttagaatttttatttgggaggtttagttttatgtgtttatgaaggtttagtttttttggggagtgattagttgtttaggagaaatttttgtatgtagaagagatttataggtttgggttcgtaggtacgaattttggaaatcggaagagtttggcgtatttatattaggttttaattttttatttgatggttggtagtaaagagttaacgtaaggggtagaagtttgtttaaagtttagatatagttcgtgaagagagagttttttttaagaattaggtttaggttgggaggaatgtggggggagtttgtagtttttggtttagtttttttttaggggagtggtattttagtatttatttggtagattttagttggataattgtttaagatgtaaagggagaatgggtggaaagaatagtgacgtggaagaggtttgggatattggtttaagatatatagaaacgtgagttgggtttaggggatagttgtgtagagagatggggtatgttgattcggtaggttaaggttttgtggttgttggttttatcgggtttttttgttttatgaagattgagtattttttttgtttttagttaattgttttgtttaggggtataggagatagtttttaagttttatagttatagggtttttattagttgaaatagatttgttttttcgttattttttttcgtagttttaaattcgttgttggaggcggttttcgttgtgttatgttatgagtaaagagtgaagagagttgtgtttatagtacgaaggggtttttttggttagtgtttaagtttttttttttggatatttttagttttaaagaatagttataaggttatttattggttgaggaagttattggagaatgggagtttcggaatttggttgtcgagtgatagtatttttgaattatgcgttttttgtttgttttagttttttttttattttttattttagggaggatgtagggattggttagaatggaggaagagttggaaagattcgtgggttttagttttttattgtaggttgaaggtgggtagcggagtatatagttttgttttttttaaagtatggttagtttagattgattttttttatttggtttttaaagtttagtatttttttaaagttatttattttttttggttttgcggtttggattaagtttatttttattttgtaatttatttttttatttttttttttttttttttaaattttagaaaatatatatggtggggaagttaaggaaatttttattggtttttttttttttttgttgttttgtgttaaagttagaatggaatagttagttttttttttttttagttttttgtttttttttatatcgattttggtcggaattatttattttattgtttttttgtatttaaatttttttgttattatttttttttgttattttttattttagttttttttttgttttgttagtatggagagtgagggaggtttttaaaaatgtatattttgtttagatgaaaggaaaaggttggggtgggattggtggatttatcgtggatttgttgggtttatgtggtgtggtgttcggagattgtgattttttgagggtttaaagattaaaatgggatggattgaggcgcgtgttgtgtgtattacggagggttggtttttgtttggttcggtgggtgtagatgaatatacgtggggaattattgttaaatttagtattgtgttttataaaaaagttgagtttattgtttacgggaaattttgtttcgaggtaggtaaaaatgttattacgggttgtattaggagaatatgggtttttttagtttttttagaatgaggaagttttttaatgtttttataggaattattttgaaaagttaatgtaaatttttgaaagaaaggaagaaagaaaaaaataaagaaaaagaatagatttatatgtttatatatgattatatggagttttgtagataaatacgagtttattttttttttttagtttatttttttttatagaggttgttgcgttatttataaattgaattaaatgagggttgaaacggtacgttttagtatgtattgtagttatcgtggaagaataagtttttttaatattggggtatgtattgatttttaaaaaatgtttgtttggggaatgaaatatgtatatgtattttatatttatagatttgttttcgaaaatttttttatttaatattatttaattatgaatttgttttgtttttagaggaatggaatgtattttagtttttataaatttggggagagataatattttgtttaggtaagaggagaggaagtttaggggtttagttgtttatattgttggttagaggaggagatagattcgggagaggttttggagtgttttgtttttttttttttttttttgattaatttattttgggaaattttaatagtgttattgattgttatattttgggttgtattttttagcgtttatttttttcgattttaggttagggttggacgtgaaagttgggtttttgtttggtttcggtgtatgttttttttgtttatttgtttgtttttttttttttaattttattcgttttttttttttttttatataaatattttttttttttttttttttttcgttttttttttttttttttttttgtttatttaatttgttttaaaaagaaaattatttaaagggggggggtgtttttttagttttttgtatttttgttgttgttattttcgaagttgagtttttgttagagatttcgaggtttttagtttttttaaatagatagatatatattttttttttaaatgagatgaaatgagtggcgttttggggtggagggaggcgttggttggagtcggggttgggggtgggagggggtgagggaaaggttggggggggacgtattatttaacgttgttgttgtcgaaggtgtggtattgaaagttttcgttaacgtattttatgtttggtagttttatttcgtatttgtttacgtattagtagatgttacgtttgcggttacgggaaggtttgtattggggtgagtagagtaataggcggtgaggacggtcgtattttagggttttgtttttttttgttttgttttttgtttattttaaggtaagatttttatttttagagagttgagggtattagattcgatttttgggtttttggtgtttttattttacggaaagatttagggaaaatgtgaatttaggtagtttatttttggtaagtttttttaattttttttttttttttttttttttttagatatggggtttcgttatgttgtttaggttggtttaaaatttttgagtttaagtgatttttttgttttagtttttggagtagttgggattataggcgtgagttattgtgtttggtttatagtttcgttttaaatattatttatttgagtttttttaacgtgaaattttgtagggatttttaagagagttatgatttaataataatgatgatggtaataataataatagaaggaggtatgatttgtggtgttattatgtagtagatattatttaacgtttggtaggtagtaggtattgttttaagtgttttataaagattaattatttattttttatttattattttatataagggtttggaggtatagagatattaaatggtgagtaataggatatagttagtaagtggtagagttaagatttgttttagtgtggtttggtttttatatttagattattggtgtttttaaagtagtattagggttacgtgttta

SEQ ID NO: 307 - DNA, 4001 bp, Artificial Sequence
  chemically treated genomic DNA (Homo sapiens)
tggatacgtgattttgatgttgttttaagggtattaataatttaaatgtaagagttaggttatattggggtaaattttggttttgttatttattagttgtgttttgttatttattatttaatgtttttgtgtttttagatttttgtgtaaaatggtgaatgaggagtgagtgattggtttttgtaaagtatttagaatagtatttattgtttattaaacgttgagtggtgtttattatatgataatattataaattatgtttttttttgttattattattattattattattattattggattataatttttttgagaatttttgtagagttttacgttgggggaatttaaatgggtaatatttaaaacgggattataagttaggtatagtggtttacgtttgtaattttagttattttagaggttgaggtaggaagattatttgggtttaggagttttagattaatttgggtaatataacgggattttatgtttgaaaaaaaaaaaaggaaagaaagggattgaaggagtttgttaagggtaggttgtttaaatttatattttttttgggttttttcgtgaaatggggatattagaaatttaagggtcgggtttagtgtttttaattttttggggatgagagttttgttttggggtagataagaggtagggtagggaggagtagagttttggggtgcggtcgtttttatcgtttgttgttttatttattttagtgtaaattttttcgtggtcgtaaacgtggtatttgttggtgcgtggataagtacgggatgaagttgttaggtatggagtacgttgacggggatttttagtgttatattttcgatagtagtaacgttgagtgatgcgtttttttttaattttttttttatttttttttatttttagtttcgattttagttagcgtttttttttattttaggacgttatttattttattttatttaagggaaaaatatatatttatttatttgaggaaattgaggatttcggaatttttagtaagggtttaatttcgaaaatggtaataatagagatgtaaaaagttaaaaagatattttttttttttaaatggttttttttttgaggtaagttggatgaatagagaagggaagagaggaagaacgagaggaagagaagggaaggaagtgtttgtgtagaagagagagaaagacgaatagagttaggaaaaggaagataagtaggtgggtaggaaggatatgtatcgagattaggtaggggtttaatttttacgtttagttttggtttggggtcgggagaggtgggcgttagaagatgtagtttaggatgtggtaattaatgatattattggggttttttaggatggattggttagggggagaaaggaaaaggtaaaatattttaggatttttttcggatttgtttttttttttagttagtagtatggatagttggatttttgaattttttttttttttatttgggtagagtgttgtttttttttaaatttataaaaattaaaatgtattttatttttttgaaagtaaaataaatttataattgagtgatattaaatagagaggttttcggaagtagatttgtgaatatgaaatatatgtgtatattttattttttaggtagatattttttagaaattaatatatgttttaatattggaaagatttgtttttttacggtgattatagtatatgttgaagcgtgtcgttttagtttttatttaatttaatttgtaagtagcgtagtagtttttgtgggggaggataggttgaaaaaaaaaagtgggttcgtatttatttataggattttatatagttatatataggtatataaatttattttttttttttgttttttttttttttttttttttttaaaggtttgtattaattttttaaagtagtttttataggggtattgaggagtttttttattttgggaaaattgagaaaatttatatttttttaatataattcgtaatagtatttttgtttgtttcgaggtagagtttttcgtgagtaataaatttagtttttttgtggggtatagtattggatttgatagtgattttttacgtgtgtttatttgtatttatcgagttaggtagaggttagtttttcgtggtgtatatagtacgcgttttagtttattttattttagtttttaaatttttaggaagttatagttttcggatattatattatatgagtttaataggtttacgatggatttattagttttattttagttttttttttttatttgaatagaatgtgtatttttggaagttttttttattttttatgttggtagagtaggagggagattgaagtaagagatggtagagggagatggtggtaaaaaggtttagatgtaggagaatagtaagatggatggtttcggttagagtcgatgtggggaggaatagagggttgaagggagagggggttgattgttttattttagttttggtataaagtagtagaaagggggaaaagttaatagaaatttttttagtttttttattatatgtattttttaggatttgagaggaaagagaggaaaatgggggaatgggttgtaaaatagaaatgagtttaatttaggtcgtagagttagggaaggtgagtaattttaggagggtgttagattttagaagttagataggaagaattagtttaaattggttatgttttggaagggataagattatgtgtttcgttgtttatttttagtttgtaatgagggattgaggtttacgagtttttttagttttttttttattttggttagtttttgtattttttttggggtggaggatggaaggaaagttgggataagtagggaacgtatgatttagggatgttgttattcggtagttagatttcgaaatttttattttttaatgatttttttaattaatgggtggttttgtgattgttttttaaggttgaagatatttaggaaagggggtttggatattggttaaggagattttttcgtgttgtggatatagttttttttattttttgtttatggtatgatatagcggagatcgtttttaataacgaatttggggttacgaagaggaatagcgaaaaagtaaatttgttttaattgatgggaattttatagttatagaatttgggggttattttttatgtttttggataggatagttggttggggataggagaagtgtttaatttttatgagataaaggggttcgatagggttagtagttataaggttttgatttgtcgagttagtatgttttatttttttgtatagttgttttttaaatttaatttacgtttttgtatgttttaggttagtattttaaattttttttacgttattgttttttttatttattttttttttgtattttgagtagttatttaattaggatttgttaagtggatattggggtgttatttttttgagaaaagattgagttaggaattataagttttttttatattttttttagtttggatttaatttttgagaggggttttttttttacggattgtgtttggattttgagtaggtttttgttttttgcgttggttttttgttgttagttattaggtgggggattagagtttggtgtaagtgcgttagattttttcggtttttaaagttcgtgtttgcgaatttaaatttgtgagttttttttgtatgtaggagttttttttgggtagttggttattttttagagaagttgggtttttatggatatatggaattaagttttttaaatgggagttttggttgagtttagggtggggagattttgggaagggaggtattggaggaagacggtatttttttttttatggtagggtgtgagggaggtaggtttggaatggtgcgagtatggtaatttaagtaggggtttggtttttttgattttaggttggtttttggtcgattgtttgtttatttagagattttggatttcggattatttatgg

SEQ ID NO: 308 - DNA, 4001 bp, Artificial Sequence
  chemically treated genomic DNA (Homo sapiens)
agttttagtgatttgtttaaagttagagaattaataagtattaagtagaagattaagagaagagtttatattagtaatatttagttaagttattttttttttgttttatatattagggttttagtgggtattttttaaaagttgatatttgttattttagttttttatttataaagtgggatgataatataatatatttaaatagttgtatgtttttttttttttttaattaaatagggtagagatagtgtatttgaaaaaaaattgtattagaaagtgtttttcgtttaaatggtggttattattttatattttggttgtatttcggaattatagtaggtagttttgtgtgtttgttgatttttatttatgggaaatgtgtttgtttatattatagtgtattatttatttttttttttaatatttatgtggttaaattacgaattgttatattaataagatgtaaatatatttgagagggtggttagatttaatcgtttttataaagttgttttaatagttgttttttaatagatggatagtttatatttggttacgtttttgtgatagtgtgatgattgaattttttaatagatggtatataaatatttgggaaaatatttttttaatattaattgttataaaaaagatttttagagtgttagaaaaatgatagtttgtatttttaagtttttagtttttgttattataatttagatgatttggaagtttttatttttggtatgtggatttgttttataaatgagtatatatatttgtattagagtgaaatgatgaggaatattttgttgttaattagagatttaatatagatatagtatttaaatttttttttgtttgttgatagatgtatataatttttttttgttgagttattttatttttattttatatatagaaaatataattttttataagaattaattgttagatatttatgtattttttttaaaaagtattgatttaaaaaaaattattaaatttagaattttaaatatgtttattaatgtgatgaatttattagttttttaagttgttttgcgtttgttgttgattatttagtatggtttttggaatcggtaagtgaggaatttgataataaatggggtaggaaggagagttatgaaaatttgtgatggtatttatgattgttataatgataaagggtatttattgatatttagtgggtgtaaattagagtatttatatatgttatattatatagtatagttttaaataagaaagaaatgttttatgttttatattaatttgaatatttggttggatatttatttgagtttggaatttaattttgtttaaatgaaatgatagagtaggttttgtaatatatggtatttttgtagagttttagtatttataaaatattaaatgttagtatttatttttatttttgttttttgattttattatattgttgtataaaaggttgaaagatttttgatttgattttattgtttttgaattttgatttttttatgttaaataagtgtaagtatataaatttttttttatattttttagtatagttatagattgaatatttatttagtaaatagatattatatgtttatttttttattttttttttttattttaaatagattattttttaatatttaatttttgatatttttaaaatttgtgtaagttatattatttagggatttttagatttaaagagaaaattatagaatgtttgttattataaaggggttttgaaattgatcgggatgagaagtattattatagaaaattaagtaatataagataaattatttttttatttgtttttttgtgtatatattagtgttggaattatttaaagaaaaggatagggtcgtgattttaagtttttaatatagaatgtagttttaataaattttgtattattttgtttttatggatgttttaaattgatttttttttggtaagttgtattagttagtttttttttgtatttgttattgtagatggcgtttaatgattgttttagtttgaattattttggtaatttttgtttaggggatttgatcgaagtgtttcgttttggttattagtattgggttttgtatttgggtgatggttacgttattaatatagtatttgtaggtgaggtttatttttagtggtttttgggagtaaagttttagtgtttttgttataggaagtaattatgggtgaaataataaataaaataaaatcgaaataaaatatagaaagtagataaatttaattaatttaggtttagagaaggatattttaaaattaaagtagtattgaagaaattataaaggttaatttatatgaaattttaaaatttttggatttaaaaaattataattaaaaagtaaataattagttggggaaaatatttgttataaatatggtaaggtttagtgtttttatgttttatataaataggttattttaatttatttaatatttatttatagattatttagtatgttttgaatgttattttaagtgttgggggtatatagacgtttttttgtatggtggagtttatattttagtaagtagggatagattatgagtaagttatagaaatgttaaaattgtgataagtgatatagaaaaaataagaaggtaggatgagaagtgttgagggtagaaggtggtgggtgtagatgttgtgattttaaatgaagtggttaggaaaattttttaagaaagtgatatttgaggaaaaatgtaaaagaggtaaagaaatcggttagatgttttttagagatatagtattttaggttaaggggatagtagatattaaaattttaataaataaatggataaagaattaggaatagtttgtaaaagaagaaaagtaaaagttaatatattttttgaaaaaattttaattttttggtttaggaattgtaaaataaattaataaaatattttatatttattttattagtaaaggttaagtgataacgattagtgttgataagaatatagtgaaatgaatataaaggtattgttgatggtaatataaattgataagggttaggattttaaaagggttcgtattttttgattttgtaattgtatttttaggaatttattttggggaaatatttagagatgtagataagtatttttgtgtaaggatatttatttttgtgttatttataatggttaaagtagataatggtatatttttaataggggaatggttaaatgaattaagatttagttatatgatattagttattaaatattttttattgagaaatttttattgtattatggagggaaattgtagaaagagttgaggtggtgtcggttttagagatgtttatatttaggggtttaattattatttagattttttgttatatatttgtatttttttttatgtgttgtttttattttttcggattatgtttttttaaaaaattaaattgatgattataagtagttttaggttttgatttttaggtttttttgatttaatacgaaagagttaattgtaattatttgttatagttaaagaattacggagatagattttaattattttagtgtgagttttatgtttatcgttggattattattgtgtttaagagaatggaatattgtgattggtttagatataattgtttttaggaataaataggtaatggtgggatttggtgttggatagatataaataatagtatttataatagttattaaaagttttatatttggatatgttttattgtagggaagatggttttaatatgatatttatttgaaaaagattaattatatgtttagttataaagtaagttttaataaagttaaaaaaattgaaattatattaagtatatttttgaattatagtgtaataaaaatagaaatgaatataaagaagattttttaaaattatataaaaatatggaaattaaatagtttggtttttaatatcgatgagtgatgtttaatatttagtgtta

SEQ ID NO: 309 - DNA, 4001 bp, Artificial Sequence
  chemically treated genomic DNA (Homo sapiens)
tgatattagatattaagtattatttatcgatattgaggattaagttgtttaatttttatgtttttgtatagttttgagaaattttttttgtatttatttttgtttttattgtattgtggtttaagagtgtgtttggtatgattttagtttttttgattttattgagatttgttttatgattaagtatgtggttaattttttttaaataaatattatattaagattattttttttgtaataaaatatgtttagatataagatttttaatggttgttatggatgttgttatttatatttatttagtattaaattttattattgtttatttatttttggaaataattgtgtttgagttaattatagtattttatttttttgggtatagtgatagtttagcgatgaatatggggtttatattggagtgattggagtttgttttcgtgattttttaattgtaataggtagttatagttagttttttcgtgttggattaaaagaatttaagagttagaatttaaagttgtttatggttattagtttagttttttaaagagatatagttcggggaaatgaagatagtatatagaaaaaaatgtagatgtgtgatagagagtttaaatagtggttaaatttttaaatataggtatttttgaggtcggtattattttagttttttttgtagtttttttttatgatgtaatgaagattttttagtaaagaatatttgataattaatattatatggttaaattttaatttatttaattatttttttattgaaaatatgttattgtttattttaattattataaatgatatagaagtgaatatttttatatagaaatgtttgtttatatttttaaatatttttttagaatagatttttagaagtataattatagggttagaggatacgaatttttttaaggttttagtttttattaatttatattattattaataatatttttatgtttattttattatatttttattaatattgatcgttattatttaatttttgttaatgagataggtatgaaatattttattggtttattttataatttttaggttagaaagttgaaatttttttaaaaggtgtattagtttttgtttttttttttttataaattgtttttaattttttatttatttgtttgttgaggttttagtgtttgttgtttttttgatttgggatattatatttttagagagtatttgatcggtttttttattttttttatatttttttttaaatgttatttttttaagaaatttttttgattattttatttaaaattatagtatttgtatttattattttttgtttttagtattttttattttatttttttattttttttgtattatttattataattttaatatttttgtaatttgtttatggtttgtttttgtttattaaaatgtaaattttattatgtagggagacgtttgtatatttttagtatttagaatagtatttagaatatattaggtgatttataaataggtgttgaataaattgaaataatttatttgtgtgaaatataaagatattgaattttgttatgtttgtggtaaatattttttttagttggttatttattttttaattgtgattttttaaatttagaggttttaaaattttatgtgaattggtttttgtgatttttttaatgttgttttggttttagaatatttttttttaaatttagattagttggatttatttgttttttatattttatttcgattttgttttgtttattattttatttatgattattttttgtaataagaatattaaaattttgtttttaggagttattggaaataaattttatttataggtgttatgttgataacgtaattattatttaagtatagggtttagtgttgatagttaggacggaatatttcgattaagttttttgggtaggggttgttagggtagtttaaattgaagtaattattaaacgttatttgtaatgataaatataaagaagagttagttaatataatttgttaaaagaaaattagtttaagatatttataaaagtagaatgatatagaatttattgagattgtattttatattaaagatttagaattacgattttgtttttttttttgaatgattttaatattgatgtgtgtataaggggataagtagagaaataatttgttttgtattatttaattttttatagtaatgttttttatttcgattaattttagagtttttttataataataagtattttgtaattttttttttaaatttagaaatttttggataatataatttatatagattttaaaaatattaaggattaaatattaaaaaatggtttatttaggataaaaaggggaaataggaaagtaaatatataatatttgtttattaagtaaatgtttagtttatgattatattaaaggatataaaaaagggtttatatgtttgtatttatttagtatgaaaaagttagaatttaggagtaataaaattagattagaagttttttaattttttatatagtagtatagtaaaattaagaagtagaggtaggggtggatgttaatatttaatattttgtgagtattaaaattttgtaaaaatgttatatattataaaatttattttgttattttatttaagtaaagttgggttttaggtttagatggatgtttagttagatgtttaaattaatgtaggatatggaatattttttttttgtttaaaattatattgtgtagtgtagtatgtataggtattttggtttgtatttattaaatattagtaaatgttttttgttattgtaataattataaatgttattatagatttttatgatttttttttttgttttatttattgttagattttttatttatcgattttagaagttatgttaggtggttaatagtagacgtaggataatttggaaagttggtgagtttattatattgatgaatatgtttgaaattttaagtttggtaattttttttaagttaatattttttagaaagaatatataagtatttgatagttgatttttatgaaaggttatattttttatgtatggaatagaagtagaatgatttagtaagaggagattatgtatatttattaataaataaaggaggatttaaatgttgtatttatgttgaatttttaattgataatagggtgttttttattattttattttaatgtagatatatatgtttatttatgaaataaatttatatgttagaaatagaaatttttaaattatttaaattataatagtagagattaaggatttgggaatatagattattatttttttggtattttaaaagttttttttataataattaatgttagaagggtgtttttttaagtgtttgtatgttatttgttgaaaagtttaattattatattgttatagaaacgtggttaaatgtaagttgtttatttgttgaaaaataattattaaaataattttatgaaaacgattaagtttaattatttttttaaatatgtttgtattttattaatatggtagttcgtaatttggttatatgggtattaaaaggaaaaatagataatatattgtgatataaataaatatattttttatgaataggaattagtaaatatataaagttgtttgttatgatttcgagatgtagttaaagtataaaataataattattatttgaacggggagtattttttagtgtaatttttttttaaatgtattatttttattttatttaattgaaaaaaagaaaaaatatgtaattatttgagtgtgttatgttattattttattttatagataaaaagttaaagtagtaaatattaatttttggaaaatatttattgaaattttaatatataaaataaagggaaaataatttgattaggtgttattgatgtgagttttttttttagttttttatttgatatttgttagttttttaattttgggtaggttattggaatt

SEQ ID NO: 310 - DNA, 4001 bp, Artificial Sequence
  chemically treated genomic DNA (Homo sapiens)
aagtgttgggattatatgtattagttatggtgtttggtttaattttgttttaaaaaataaaataaaaataggtgaaattagtttttaaatattttatttaatttaatatattaaaaatgttattttattatgtaattaatttttttttttaagatagagttttgtttttgttgtttaggttggagtgtaatggtgtgaatttggtttattataatttttattttttgggtttaagtgattttttttttttagttttttgggattatagtttagttgggattataggtatgtgttattatgtttggttaattttgtatttttagtagagatagggtttttttattttggttaggttggttttgaatttttgatttttggtgatttgtttgttatggttttttaaaagtgttgggattataggtgtaagttattgtttttagttgtaattagtatttttttttttttttttttgatatggagtttgttgtttaggttggaatgtagtggtgtaattttggttattgtaagttttgttttttgggtttatgttatttttttgttttagttttttgagtagttgggattataggtgtttgttattatgtttggttaattttttgtatttttagtagagatatggttttattgtgttagttaggatggttttgattttttgattttgtgatttgtttgttttggttttttaaagtgttgtgattataggtgtgagttattatgtttggtttgtaattagtatttgtaaatgattaatttttttgtattaagtttttgaaatttagtgtgtattttgtgtttatagtatattttaatgtagatttaataatatataatagttatatatgattagtgattatagtataggatagtatgggtttagatttattagttttttttttaagagtatatttaggaattttttgtttttggttttagaatatatttaattttaagtaggtaattgtttttttttgttttgttttttttgggtgggaaggggatttttatagtgatagggagtgttttttatttaggaaaaagaaagggagttgtgggtttaattttgtttttgaagtttgtttaagttgtagaaatttttttggttattggataaagtaattaagaatttttatattttaattgtaatgttgaattaaattggttagaatgaaatgaattgttttaatgttaaagttaaaatttaaaattgaggagttttgtaatattaaatttattgattattttattgttatttgtaaattatagtataggtaggttgtaaagtttattaggtagtatttaagtatataatattttagttgtgtttttttttagtttttggggttattgaagaattagttttggtatagtttattataaattaattataattgtaaatttaaaagttttaatattaagtgtgggtaatatattaaggtttttataaaaaatttaaaaattagttgggagtggtgttgtgtgtttgtagttttagttattttggagggtgaggttgggaggatagtttgagttaggaaggtaggggttgtagtgagttatgagtgtattagtgtattttagtttgggtgagagtaagattttgtattaaaaagttttaatatttaaaaggattgtagtttatagtatgttatttttattgtaaattaaaaggttattttttttttttgtttattattagatatattttttttagttttattttatttgtataagttatttgggagaagtggtttttaggaagattttaaaattaatatataaatataatttttttattttattaatatattaagtttatataagagttaaataggtaaaagtagtattttaaattgttttttttttgtatatgttagttttatgatttttagttttataaagttagggattagagattaatgtaattattaatatgtatttgtttttgagtgaatttttaatgttaattaggaagggtgtttttaaaatgatgttatttgtaatttttaggaagataaatatgggttagaatttatattttgtgggttttgaaatggaaaattttttttttagatagatttattttggttgtaaatattaggagattttttgattttttgttttatttttaggttaaggagttatttgtttttaattttttattttgtttttttttttaggtggttttttgttatttggtggagaaagtgggaatatttttttgggttagtttttgttttttttgaatgttttattgtatttattggagaagattatggttttgagggattgtgataggttttaggtgaggtgtattgagttggtgagtattgtgtgatattgtgtgtattggaatatagtgtattttttaggttgtagttaagatggtagttgtgggttggtggttggttttttagtttttagttttgtggggttgagtggtgaggatttttttattatttgtgtattttattttatggaggttgtaaaagaagtttggttaattgtttttttagtgttattataaaagtttttttggggtggtgttgtataatgtgagtgatgttgtagtggttgagttgttatttttttgtagttggtgttttttttttgaatatatgttaggttttgttttaagtatagtttttgtgtttttattggatattatgggtaatttaagtattggagtttgagtttgtgtatttgttatttgaataggtgttataggttttttggtgtttgtgtatttgtgaagtgtgaaaaaagtgtgtttttgttgggatgggaaattagtttttttattggttagggttagaaattttgtttttgaggtatttttaattaatggaagtgtggtattttttatttaaattgtttataaatttttgtttagttaaagttaagagtggtgttagggatttgaattgtgttgatgaagtttggtgatttattttttgagtattgttgggattttgaattgtgatgattattttttttttagaggagttggatttttttaagtatagtgatttgtagaatttagttaagagtttgggtttttgggttaatttgagggtatggtgttggtggtgtgggtttttgggtgggtgtggtgggaatagtggttttggggagatgtggtgtgaagggattgagagggaagtttgggattgaggtagttttttttgttttttgggtagtagatgtggtttatggtagttttagttagaattttgataaatggaagaggaattgtagtttttattttattttgaagttggtttgtttgggtgtttatatgataagttttattttgagggatggtttattgttttttgttttgttttgttttgaaattattgtatattttttagggtgttgattatgaaatttaggtttagaaagtataaggggtgttgttaattgttagataattaagtaaataattggtttagtttttggaaaattttaaatagattttagtgatttgtaatattgttgataattttttgatattttattgatggatttgttagaaaaaaaaaattgatttttaggggagtatttttttgggtaaatttttattgatgattgttgggttgatggtttttattaaaattagtaaggtttttgattttgaggttataagatgtttggagagttggtttggtgttgtggtttatgtttgtaattttagtattttgggaggttgaggtaggtggattatttgaggttaggagtttgagattagtttggtttttaaaaaattagttgggtgtggtggtatatgtttgtgatttaagttttttgtttgtgattttagttatttgggaggttgaggtagaagaattgtttgaatttgggaagttgaggtggtagtgagttaagattgtattattgtattttaattttggtgatagagagagatttagttttaaataaaataaaaataaataaaaaatttaagatgttagaagaagatt

SEQ ID NO: 311 - DNA, 4001 bp, Artificial Sequence
  chemically treated genomic DNA (Homo sapiens)
aatttttttttaatattttgggttttttgtttgtttttgttttgtttgagattgagtttttttttgttattgaagttggagtgtagtggtgtgattttggtttattgttattttggttttttaggtttaagtgatttttttgttttagttttttaagtagttgggattataggtaaaaagtttggattataggtgtgtgttattatgtttggttaattttttaagggttaggttggttttgaatttttgattttaggtgatttgtttgttttgattttttaaagtgttgggattataggtgtgagttatagtgttgggttaattttttaaatattttgtagttttggagttaaagattttattggttttgatagagattattaatttaatagttattaataaaaatttatttaaggaggtgtttttttaaaagttgattttttttttttgataggtttattaataaagtattaagagattattggtaatattataaattattggagtttgtttggggttttttagaagttgagttaattatttatttaattgtttaatgattaatgatattttttgtgttttttgggtttgagttttgtaattgatgttttgagaggtatatagtaattttaaaataaaataaaataaaaaataataaattattttttggaatagagtttattatgtgagtatttagataagttagttttaaaatgaggtgaaaattatagttttttttttgtttattagagttttaattgggattattgtgaattatatttattgtttgaggggtagggagagttgttttagttttgggttttttttttggtttttttgtattgtatttttttgaggttgttatttttgttgtgtttgtttagggatttgtattgttagtgttgtatttttaggttggtttggagatttagatttttggttaagttttgtaggttattgtatttgagggagtttagtttttttagagaggggatgattattgtgatttgaaattttggtgatatttggaagatggattattaaattttgttagtgtggtttaaatttttggtgttatttttaattttgattaggtagaaatttatagatagtttaaatgaagaatgttgtgtttttattggttgaaaatgttttaaaggtggggtttttaattttgattaatagaaaggttgattttttgttttaatagaggtgtgttttttttatattttatgaatatgtaggtgttaaagggtttgtaatgtttgtttaggtaatgagtgtgtggatttggattttagtgtttggattgtttatgatgtttaatgaggatgtaggagttgtgtttggggtggggtttggtgtgtatttgaaaggaaggtgttggttgtgggaagatggtggtttagttgttgtggtattgtttatgttgtgtaatgttgttttggggggatttttgtggtggtattgagagggtgattgattaagttttttttatgatttttatggagtgggatatgtaggtggtgaaggggtttttgttgtttggttttgtagggttgggggttgaggagttagttgttggtttgtagttgttgttttggttgtagtttgagaggtgtgttgtgttttagtgtgtatagtgttatgtagtgtttgttgatttggtgtattttgtttgggatttgttgtggttttttggggttgtggttttttttagtgagtgtagtgaagtgtttgggaaaggtagaggttagtttgagagggtgtttttgttttttttattgggtggtggagaattatttggggaagaaaatgggatgaaaagttggaagtaaataattttttggtttggggatggggtagggaattggggagttttttgatatttatggttaggatgagtttgtttagaggagagattttttattttaaggtttgtagagtatgggttttgatttgtgtttgtttttttaggagttataaataatgttgttttggaagtgttttttttagttggtattgaaggtttatttaaaggtaggtatgtattgataattatattggtttttagtttttgattttatgagattgaggattgtggaattgatatgtatgaggagaaaatagtttgggatgttgtttttatttgtttgatttttatatgaatttgatgtattaatgaaatgaaaaagttgtatttgtgtattggttttaggatttttttgagggttattttttttaggtggtttgtataagtgaagtgaggttaagaaagatgtatttagtagtggataaaagaaaaaaataattttttggtttatagtgagaataatatattataaattataatttttttagatattagaattttttgatatagggttttgtttttgtttaggttggagtgtattggtgtgtttatagtttattatagtttttatttttttggtttaagttatttttttaattttattttttggagtagttgggattataggtatatagtattatttttggttaatttttaaattttttgtagaggttttagtatgttgtttatgtttgatattagaatttttaagtttgtgattatggttagtttgtaataagttatgttagggttaattttttagtaattttagaaattggagaaaaatataattagaatgttatgtatttgaatattgtttggtaaattttgtgatttgtttgtattatgatttataagtgataataaagtagttagtgaatttggtattgtaaggttttttaattttgagttttggttttaatattgagataatttattttattttgattagtttgatttaatgttatggttaaaatataggaatttttagttgttttgtttagtaattaggaagatttttgtagtttggataaattttaaaaatggagttagatttatagtttttttttttttttttgaataaaagatattttttattgttataggagttttttttttatttaaaggggataaagtaagaaggagtaattgtttgtttggaattgggtgtattttggggttagaggtagaaggtttttgaatgtgtttttggagaggaggttaatgaatttagatttgtgttgttttatattgtaattattagttatatgtagttattatatattattaaatttgtattgagatatgttgtgaatatagaatatatattggattttaaagatttagtatagaaaaattaattatttataaatattgattatgggttgggtgtggtggtttatatttgtaattatagtattttgggaggttgaggtgggtggattataaggttaggaaattgagattattttgattaatatggtgaaattgtgtttttattaaaaatataaaaaattagttaggtatagtggtgggtgtttgtagttttagttatttaggagattgaggtaggagaatggtgtgaatttgggaggtggagtttgtagtgattgagattgtgttattgtattttagtttgggtgatagattttgtattaaaaaaaaaaaaaaaaaaatattgattatggttgggagtggtggtttatgtttataattttagtatttttgggaggttatgataggtagattattagaggttgggagtttgagattagtttgattaaaatggagaaattttgtttttattaaaaatataaaattagttgggtatggtggtatatgtttgtaattttagttaggttgtaattttaggaggttgaggagggagaattgtttgaatttgggaggtggaggttgtggtgagttgagtttatgttattgtattttagtttgggtaatgagagtgaaattttgttttaaaaaaaaaaattgattatatggtgaaatgatatttttgatatattgggttaaataaaatatttaaaaattaattttatttgtttttattttattttttaaagtaaaattaggttaggtgttgtggttgatgtatgtaattttagtattt

SEQ ID NO: 312 - DNA, 1301 bp, Artificial Sequence
  chemically treated genomic DNA (Homo sapiens)
tattgttattttggtttgtttttaatgagttgttgggtatattttttagatggggtggtggttgggtagaggggttttttattttttagtaggggtggttgggtagaggtgttttttattttttggatggggtagttggttgggtgggggggttgattttttttttattttttttttggatggggtggttggttgggtagaggggttttttattttttagtaggggtggttgggtagaggtgttttttattttttggatggggtggttggttgggtggggggttgatttttttattttttttttagatggtatggttggttaggtggggggttgatttttttattttttttttagatggtatggttggttaggtggggggttgatttttttattttttttttggatggggtggttggttgggtggggggttgatttttttattttttttttggttggtatggttggttgggtggggggttgatttttttattttttttttggatggtatggttggttaggtggggggttgatttttttattttttttttggatggggtggttggtttggtgggggttgatttttttttattttttttttggatggggtggttgttgggtggagatgttttttattttttagatggggtggttgttgggtggagaggttttttattttttagatggggtggttgttaggtagagggtttttttattttttagatggggtggttgggtagagatgttttttattttttagatggggttttggttgggtagaggtgttttttatattttagatggggtggtggggtagaggtgttttttatattttagatgatgggtggttgggtagagatgttttttattttttagatgtgatggtggttgggaagaggtgttttttattttttagatgggatggtggttgggtggagatgttttttattttttagattgggtagttaggtagaggggttttttatattttagatgatgggtagttaggtagagatattttttattttttagatggggtggtggttaggtagaggttgtaattttggtattttgggaggttaaggtaggtggttgttttttgtttttgggttttgtggggtttgtttgtttttttagttgttgttttttgggtggtgtttgttggtgtggtggtaaagaaaaaaattatttttgtattaataaaattaaaagtaaaagtagatttgtatatataaagggtaaagtaaaattgattttttgtatatatagtaaaattgattttttgtatatataggtttatgaa

SEQ ID NO: 313 - DNA, 1301 bp, Artificial Sequence
  chemically treated genomic DNA (Homo sapiens)
tttatagatttgtatatataaagggttaattttattgtatatataaagggttaattttattttattttttgtatatataggtttatttttatttttaattttgttaatataaaaataatttttttttttgttattgtgttggtgagtgttgtttgggaagtagtggttggaggagtggatgggttttgtggggtttgagggtaaggagtagttgtttgttttggttttttaaagtgttgagattgtagtttttgtttggttgttattttgtttgggaagtgaggagtgtttttgtttggttgtttattgtttgggatgtgaggagtttttttgtttggttgtttagtttggaaagtgaggagtgtttttgtttggttgttattttatttaggaagtgaggagtgtttttttttagttgttattatatttaggaagtgaggagtgtttttgtttagttgtttattgtttgagatgtggggagtgtttttgttttgttgttttatttgggatgtgaggagtgtttttgtttggttgagattttgtttgggaggtgaggagtgtttttgtttggttgttttgtttgagaagtgaggagattttttgtttggtaattattttgtttgagaagtgaggagtttttttgtttagtagttattttatttgggaagtgaggagtgtttttgtttggtagttattttgtttgggagggaggtgggggggggttagtttttgttaggttagttgttttatttgggagggaggtgggggggttagttttttgtttggttagttgtgttgtttgggagggaggtgggggggttagttttttgtttggttagttgtgttgattgggagggaggtgggggggttagttttttgtttggttagttgttttatttgggagggaggtggggggattagttttttgtttggttagttgtgttgtttgggagggaggtgggggggttagttttttgtttggttagttgtgttgtttgggagggaggtgggggggttagttttttgtttggttagttgttttgtttgggaggtgaggggtgtttttgtttggttgtttttattgggaagtgaggagtttttttgtttggttagttgttttgtttgggagggaggtggggggggggttagtttttttgtttggttagttgttttgtttgggaggtgaggggtgtttttgtttggttgtttttattgggaagtgaggagtttttttgtttggttattattttgtttgggaggtgtgtttaatagtttattgagaatgggttaggatgataatg

SEQ ID NO: 314 - DNA, 3001 bp, Artificial Sequence
  chemically treated genomic DNA (Homo sapiens)
aataataaaagatttagaatattttataaattttgttgataaggtagtggtaagattttagagaattaattttgaaggaagttttgttgtggatgaaatggtattatatagtattatatgttatagagaaattttttatgaaaggaagtgtttattgatgtagtattgttgttttattttaggaaattgttatagttattttaatgtttagtaattattattttgattaattagtagtatggaggtaagattttttattagtaaaaagattatgatttgttgaagatttagatgattatgttaaattaagtttagtataaagttgtttttttatgtattttaagtttagattaataatttatttttttttttttttttttttttttttttttttttttttttttttttttttttttttttttttttttttttttttttttttttttttttttttttttttttttttttttttttttttttttttttttttttttttttttttgagatggagttttgttttgttgtttagtttggagtgtagtggtatgatttttatttattgtaatttttgttttttagtagagagaattaagagatttttttgtttttattttttgagtagttgggattataggtttgtgttattaagtttggttaattttttgtatttttagtagagatagggttttattatgttggttaggttggttttgaatttttgattttaaatgatttgtttttgtttttttattaaagtgttgggattatagatgtgagtttttgtatttggtttaatagtttttttatatatagtgaattgtagataattataattgtaaatgtgtaaagagattgtaattttgtaataagtagtgagttttagttaattatagtagtggagttttggttaattataggtggttaattgtttaaatagtgtttaaaatagttagaggttgagttgtaattaatttagttgtttttatatttgattgtaatttttgtaagttatttttttttttttgtttataaatgttatttgaatatatggtagtttgaattattttgaatttattttggttttagggattattggattttggatttattttttggttaatttaattttgtaaagtttaatttgtttaaagattttttgggttggatatagtggtttatgtttgtaattttagtattttgggaggttgaggtgggaggattgtttgagtttaggagtttgagattagtttggttaatatagtgagattttgtttttatttataaataatttagttaggtgtggtggtgtgtgtttgtagttttagttattggggtttttattttttgtggtaatatattttggagagggggaggtatttttgtttttgttgggtgggagaatggttagtgggtaagggaggatgaaaatgagaattgtgattgttagagggtatgttaattttaggaagagaatgtaagaaagttgggttttgtggagatttggtatatttatgttatttggaaaattattatgtgttttttggggtaagattaaggttttaagttattttttgtagtttagtggattttttggttattttttttatggttttatagtgattgtgagttgttgttttggtgagaattttttggtattgtgtgtgtttttgtttgttgtgtgtgtttgtttttttgggatttggtgttgtgtgtgtttttgttgtgtttttgttttttttggtttgggagatttgatttttttggtgggtggaagtggttataatttggtgattgaaaagatttttaggaatgttgtattagttgtgttttttaggatagtaggtttttgtttttttgttgggtgttgtttagttgtgttttttgttttttaggttagtttttttgtttgtttgttgtagttgtagttgatggttggggtttgggttgtgtggggtgtagtggtttaaatttagtttgtttttggtttttgggagattggaggattttattggagttttgtgttttattagttttgttttttggataagatatttgatttttttgatttgtggtttttttttttgtaagtggggataatgattgtgtttatttaatagggttattgaagaggtgtttaggttaagtgtttgttatttaggaggttgtgatagatgtgaatttttattttttgtttttagtttttgtgatttttttttgtgaaaaaagttgatagaagggttttgagttttttttgtttgtataatttagtttattggggtagtgtaataaaaaaggagatgtgttattattatttttttagagtttaaatttatttttttttattatttttttagagtagtggttttagaggtttatattaaaaggggaattttttttttttttttttaagatggagttttgtttttgttgtttaggttggagtgtaatggtgtgattttggtttattgtaatttttgttttttaagtttaagtgatttttttgttttagttttttgagtagttgagtttatagatatttgttattatgtttggtttattttttgtatttttagtagagatggggttttattatgttggttaggttggtttttagtttgtgtttttaggtgatttgtttgttttggttttttagagtgttgggattataggtgtgagttattatgtttggtttaaaaggggaatttttattgaatgttgtattagtaataggagtagtaggattgtttttattaagaaatttggtgtagggttgtgggagttggaaagggtagatttagggaaggttgtttaagagaggaattaggtttttagtatttaggatgggtaattatttttggtattttttttttgttagtggaatgaggtgagtattaggagtttggattgttgtttagaggttagtgtttttaattttggtttaaattttggtttttgttttttatggagtttggttagaaaattagaaaaattagaaaagttt

SEQ ID NO: 315 - DNA, 3001 bp, Artificial Sequence
  chemically treated genomic DNA (Homo sapiens)
gggtttttttgatttttttgattttttagttagattttatgggaaatagaaattaaaatttaaattaaagttaggaatattggtttttaaataataatttaggtttttgatatttattttattttattaataaaggagaaatattaaaggtaattatttgttttaagtgttagggatttgattttttttttgggtagttttttttgagtttattttttttagtttttataattttatattaggttttttggtgggagtaattttgttgtttttattattgatatagtatttggtgaaaattttttttttaggttgggtgtggtggtttatgtttgtaattttagtattttgggaggttaaggtgggtggattatttgaggatatgagttggagattagtttggttaatgtggtgaaattttgtttttattaaaaatataaaaaatgagttgggtgtggtggtggatgtttgtaagtttagttatttgggaggttgaggtagaagaattgtttgaatttgggaggtggaggttgtggtgagttgagattgtgttattgtattttagtttgggtaataagagtgaaattttgttttgaagaaaaagaaaaaaaattttttttttagtgtgagtttttgaagttattattttggggagatgataggagaggatggatttggattttgaaaaggtagtgataatatatttttttttttattgtattgttttagtaaattgagttgtataaatagaaaaaatttgaaatttttttgttaattttttttgtggggaagagttatggaaattggaaatgggaaatgggaatttatgtttattgtagttttttaggtggtaaatgtttagtttgaatatttttttaataattttgttaagtagatatggttattatttttatttatggagaagaaaattgtgggttggaaaggttaaatattttatttagggaatagggttggtaaagtgtggggttttgatgaaattttttagttttttgagagttaggagtaaattgggtttgggttgttgtgttttgtatagtttagattttagttattaattgtgattgtggtgggtaggtgggagaattgatttgaggggtggagggtatggttgagtggtgtttgatagaaggataggggtttgttgttttgagagatgtggttggtatggtgtttttaagaatttttttgattgttgggttgtggttgtttttgtttgttaagggaattaaattttttgggttggaaggggtggggatgtggtgggggtgtgtgtggtgttggattttagggaagtggatgtgtatggtaggtgggggtgtgtatagtgttggggggtttttattggggtaatggtttgtggttgttgtggagttgtgaaagggatggttgggaggtttattgggttgtgaggggtgatttgaggttttggttttgttttggagggtatgtgatgattttttaggtggtgtggatatgttaagtttttatagaatttaatttttttatgttttttttttaaaattgatgtgttttttggtagttatagtttttatttttgtttttttttgtttattggttgtttttttatttagtaaagataggaatatttttttttttttaaaatgtgttgttatgaggaataagaattttagtagttgagattataggtatgtgttattatgtttggttaaattatttgtgggtagagatgggattttgttatgttggttaggttggttttgaatttttgggtttaagtgatttttttgttttagttttttaaagtgttgggattataggtgtgagttattgtatttggtttagaaaatttttagataaattaaattttatagagttgaattgattaaagaatgagtttaaaatttagtaatttttggaattaaaataggtttagagtgatttgggttgttatatgtttaaataatatttatggatagaaaaaggaaaatgatttatagaaattgtagttaagtatggaaatagttggattggttgtaatttaatttttgattattttgagtattgtttaaatagttggttatttgtgattggttaaaattttgttgttgtgattgattgagatttgttatttgttataaggttatagtttttttatatatttataattgtagttgtttataatttattatgtatggagaaattgttaggttaggtgtaaaggtttatatttataattttagtattttggtgggggggtgggggtagattatttggggttaggagtttgagattagtttgattaatatgatgaaattttgtttttattaaaaatataaaaaattagttgggtttggtggtgtgagtttataattttagttatttaggaggtagaggtaggagaattttttgattttttttgttgggaggtagaggttgtagtgagtagagattgtgttattgtattttaggttgggtaatagagtaagattttgttttaaaaaaagagaaagagagaaagagagagagaaaagaaagaaaggaagagaaggggaagggaaggggaagggaggggaagggaggggaagggaagggaagggaaaggaaaggaagggagagaaagggagagagagaaagaaataaattgttagtttgaatttaaaatgtataaggaggtagttttatgttaaatttaatttaatatggttatttgaatttttagtaaattataatttttttgttggtggagggttttgtttttatgttgttgattgattagggtggtggttgttaaatgttgggatggttgtggtaattttttaaaataaaataataatgttgtattgatggatatttttttttatgaaagatttttttgtagtatgtgatgttgtgtgatattattttatttatagtaggattttttttaaagttagttttttgaaattttgttattgttttattaataaagtttatggaatattttaaattttttgttgtt

SEQ ID NO: 316 - DNA, 2501 bp, Artificial Sequence
  chemically treated genomic DNA (Homo sapiens)
tttgtaaatttttttgaggtaagtaagtatttttttaataagtattatttgggggtgtgtttatggtggggggatattggtttatataggtatgtatatttgtgtatataaagtatatagagaaatggtggagatatttttgtgggttatgtttgtttgtagtttaatataattatgtattattttattgatggtaagataattataagttatttgataatattaagtattttttattttaatatgttgtagtatttttgaatttttaaaatttattataatgtaagttttaatttgagagtaggagaaataagaatatatattgagtatatgtatttttgtgaggatgtgtttgtggaaggtgtatatataagtttatttttatatataattatgtatatatatataaaaattaaatatatgatatttgaaatatgtttaaatattggtttttgttttttgtaagaggtgtttagtgggattttgtttttttttttttttatttgaagataaattttttgttagagatgagttttggtatatagttttttaggtagagggtgtgtggtaggtttattgtataaatattagttttgttagattttgttgtatttattgtttgttattttagattaatttttgagaagttttaaaatttattttaatgattttgtggagtttagtttattatattttagatggttatttattttatttatgatatgtttagtagtagtttggagggagagttaatgatagtagggagggtggggtttatattttggttagatttattgtttattgtatttggttttgtgtaggtttagggtagtgagtttgagtttatttggaatgttggttaagtaggttatattatttagtgggaagagagagttttttttagagattttgtagatttttaggattaagttatttttaggaatgaattaaaaatggaagagatggttttttgggggtaagtagttttttggagattttatttgaattatatttttaggtgattatagtgtagttatagtagttataaagatatgtttataaagattttaattgtgttatgttattggggtgaaaatatagtaataaattagtttttttagaaagtatttaataatattagtagttgaggttttaagaatatggattttttaaggtggtggttttgtagataatatttttttttttttttgtttttttattatagaggattaattttaggtggtttagtttttttgatatttaggaggaaggttttaggatggtatattgtttaatattatatattgagttttttagatttggtttaggtatgtgtattgattgttgggtgggttggttaaaatatttttagaagtatatatggtattttagtttataaattatgtattatgtagttgtaattgttaatagtattttgtttttttgatggttttttgttttgttagtttttgagggtatagagaatataaggttgtttgtatttttaattttttttaaggttttttagggaaagagaaggagaggtgggagtagtttttttgggggttgttgttgggttgtttagagtttatagattttggttttagttttatatgaggttgatgatttattttggttatggaaagataagagttagagttatttttttagaggttgatgtgtttaattaatgtttgatttaattggagtagggtttagagagtggggttagatggttttagattgaagtttaattaatttgtttagttaattgttttaatttattgggttggggataggaggaaggtagaggtgatgaatggtttaaagagaataggaaggaggaggtgtgtggaaaaggttttttataagtttataaatatataaaaataaaaagtatattttttaaataaaaatgattatatttttatttggtaaaaaattgtatatatatgatttaaattttttttaaattttaatagtttttggtaattttaataaagtataatatattataattaaattaaaaaatagttgtttaagtaatagttgttaagagtgatgtgatttttgatgtttagtttttttttttattttattttatttttaaagatagagagaaaagaaaaatttttttattttgataatttggttttttttttttttaggaagttagttaataggaagtaatataataagtaaggagtgttatgggaagttataggttggttttgtattagtaggagtagttgtttttgttggttgggggtttttggggtttgtttagtttgatgttgattattgtagggggatgggttaaggaagatgatttttttggataagttgttattttatttagttttgtgtattgtattttttggttattgttttgtttttttgtaaatatttagggatttggtttttggtttggttgggttaggaaggatgtaatattaattttattttgtttttttttttttttatttgtttattttttttag

SEQ ID NO: 317 - DNA, 2501 bp, Artificial Sequence
  chemically treated genomic DNA (Homo sapiens)
ttgggggaagtggatgggtgaagggaagaggaggtaaggtggagttggtattgtattttttttagtttagttaaattaagagttaagtttttaggtgtttgtagagaaatagagtagtagttaaagggtatagtgtatagggttaagtggggtggtagtttgtttaggagagttattttttttagtttgtttttttgtagtgattgatattaagttggataaattttaggagtttttggttagtgagggtggttgtttttgttaatgtagagttgatttgtggttttttatgatattttttgtttgttgtgttgttttttattggttagttttttaaggggggagggaattgagttattaagatgggaggattttttttttttttttgtttttaggagtagggtgggatggggagggaggttgggtattagggattatattatttttaatggttgttatttaaataattattttttggtttggttgtaatatattgtattttattaagattgttaaaaattgttaaaatttaaaaaaaatttaaattatgtgtatataattttttgttagataaaaatgtagttatttttatttgaaagatgtgttttttgtttttgtatatttgtaaatttatagagaattttttttatatatttttttttttttgttttttttgaattatttattatttttgttttttttttatttttagtttaataaattaaaataattaattgagtaaattaattaggttttagtttggggttatttggttttattttttaggttttattttagttaaattaaatattggttgaatatattagtttttgaaaaggtagttttgatttttgtttttttatggttagagtgggttgttaattttgtgtggagttgagattaaggtttgtgggttttaggtagtttggtagtagtttttagaggaattgtttttatttttttttttttttttttgaaaagttttgaagggggttgagggtataggtaattttgtgttttttgtgtttttagggattggtagagtaagaggttattagaaggatgaggtgttgttggtaattgtagttgtgtggtgtgtggtttatagattggggtgttatgtgtatttttgaaaatattttaattagtttatttagtagttagtatatatgtttgggttaagtttaagaaatttagtgtgtgatgttgggtagtgtgttattttgaagttttttttttggatgttagggaagttggattatttggagttgattttttgtgatggggaggtgggggggggggggggtgttgtttgtagaattattattttgaaagatttatgtttttagagttttagttgttaatattgttgagtgttttttggaaaagttgatttgttgttatgtttttattttagtggtatggtgtagttgaagtttttgtggatatatttttgtggttattgtggttgtgttgtggttatttgaggatgtggtttaggtggggtttttagaaggttgtttgtttttagagagttattttttttatttttgatttatttttgagaatggtttagttttgagaatttgtaaagtttttgaagagaattttttttttttattaagtgatataatttatttggttagtattttaaatagatttagatttattgttttgagtttgtatagagttaggtgtaatgggtagtgagtttggttaaaatgtaaattttattttttttgttgttattggttttttttttaggttgttgttgggtatgttatagatgggatgaatgattatttggggtatggtgggttgaattttataaggttgttggaatgaattttgaaattttttagaaattaatttgaaatggtaggtagtaagtgtagtagaatttggtaggattgatatttgtgtagtgggtttgttatatattttttgtttaggaggttgtatgttagagtttatttttagtaaggaatttatttttaggtgaagaagagaggaagtaggattttattgagtattttttgtagaaggtaaggattaatgtttgaatgtgttttagatgttatgtgtttagtttttatatgtgtgtatataattatatatagagatagatttgtgtatatattttttataaatatatttttatggagatatatgtgtttaatgtatatttttgttttttttgtttttaagttggaatttgtattgtgataagttttggaaatttaaaagtattgtaatgtgttgaaataagaaatatttaatattgttaaataatttgtgattgttttgttattaataaaataatgtatagttgtgttaaattataggtaaatatagtttatgggaatatttttattatttttttatgtattttatatgtatgggtgtgtatgtttgtgtgggttagtgtttttttattatgggtatatttttaagtggtgtttgttggaagagtgtttatttattttgagagaatttatagg

SEQ ID NO: 318 - DNA, 4001 bp, Artificial Sequence
  chemically treated genomic DNA (Homo sapiens)
aattttgtaggtttaaattatttttttattttagttttttgagtagttgggattataggtgtgtgttattataattagttaatttttgtattttttttattagttttgttatgtttttttggttggttttgaatttttgagtttaagtattttagagtattttttaaagtgttgggattataggtaagagttattgtgtttagttagttttaaagtttagaattttttttttaaaaattttttttaaaagttttaaattttgaaatatttggttgttagggttttagataagagattgtggattaaaaattaagatgttttgaaaagtgtttttttttgttttttttttgtgttatttttaggttatgtaggaaaatgggaaattatgttggatttaatgttaaaaaagttagattttttgttttttttatttattttgttgttgttagttgagataggattttattggagtatagtggtatgattttggtttattgtagttttgattttttggttttggtaatttttttattttagttttttaaatagttgggattataggtgtttggttaatttttttattttttgtagagataagagttttgttatgttgtttaggttagttttaaatttttgggtttaagtgatttatttgttttggttttttatatttgtattttttaaagtatatttttaagtttagatgaatttaagtttttgtagttagaaattggtagaattggtgtttgaaattttttattttttagtgtttaaattttttattattgtaagatattttttgtgtgggttttttttgtggaaattatatttggagatttttattttttaattttaagtttttttatgatatttatttaggattagttttgtttttttgttgaaggttttaagagatttgtttttttttttttggtagttgttagtatttttattattttatgagtttttttttaagtttggttgtgaaatgtgatatttattagtttttgtagtattttttttttaatttttttgttatatttgatgataattttttaggttttttatatttttaggattttgttattaattattatagggataagtaaaagtaatatatataaaataattgtataatagaataatatagggtagttatatagaatgatttttgttgtttaattttggaaaatgtgatttttgaggatttatattttaatttttgttttttatttttgaggatggagttattgttttttttttttggttatatatttagatgtattttaggtttgatgatagttgtaatgtaaaaaagaatagtaaggtttttggtttttgtagataatttggattagataatttttagattgggtaatatttggtttattagtgttattggatgggaagttttgattgagttgtttgggtttttggtgtgttgaataaagaattgaataaaatgtagaaataaagtaataaaagaagtaatgaaagataaaataataaaagaatgaagtaataaaagtataaatttattgaagtgaattaagtgttttaagagttttaattgtagtgtttttaagggttattaggttaaaagaatttggtaaatttttaggtgttttttatagttgtttaattggttgtattttatgaaggattggtttgtgattaattagaggttgaaatggagatggttgaggataattagaggtgatgtggaaatttttgttttgtaattataggagtgaaggtgtggtttgtatgttgtttagttttgtttagaaattgttgtatttgttgtttttttgtttatgttttaatttttggttattttaattttttatttttttgttttattaggtttttattttgattaaaaatgtatttatttagttgggataaattttatattgtatttgttttatttagatgagtattttagtagagtatatggtatatgagtaggtatttaaaaatttaatatatagtatattttgttatttatgtgttaggtgttgggtaggttgagttaatagttgaatagaaatttatttatttaatgtgttaatttttatatagtatggttgtgtatttaaattaaatggaaagtggtatgggagatttggaaaggttttttgtgggtggtatttgattatttaaatttttattttagttttatttattgattttgatatttggaataagtagttttttagtgtttgtttttttattggtaggtaaatgggttaatgatggtatttttggtattagattttgttaattaatgaaaagtatatagaagaaaatagtttggttttttaagtgggtagtgtgatttttaaggatggtattttgtttgatagtttttttttaggttgagaagttagagtaaatttatttgatttttttattatatagtgttttttttttagatgagtttaaagttttaagtttatttagttttgtttagatgtgtttgtttatttttaataggtttattagagaggtgggttttttaaagtttggtatggtttattgtaggtgatgttttttgttttttagtgtttttaggtttttggggtttattttttttttttatttgattttggaatttttttttgtgttttgtttgggtgtttggttgtttggggtagaggttttttgttatatgtgtggttttgttttggtttttatgtgatttggtgtgtggagtgtgtatgtgggaatttgtgttggaggtgggtgagggttgaggggtagttagggagtgtggtttgaggagggtggggttgttttgtaggtttgttagtgtttttagttgtttttgtgtgttaaagttaaattttgatatttgttggtgggttggtgagtttattagttgatttggtaggttaggatttggtttagtggtgttgtgagttttagtgtgtgtatttgtggttgttttttagttttttttgttggatgagttttgggttgttataagattaaggaatggttattttgtttaagagaagttgtttgttttttttagttagttttgaggggatttgtattaagaaaatttttattgaagggaatattggtaaggagtttttggaaatgtgggatgtaaggttggggtgttgtggtagtggttgaagtttttttttgttgtatttttttgtagtaatttggtgagggttttttttttagtttggtggtgtggatgtggttttggtttttttttttatttagagtattttttttttattttttgttttatggggtgattgtggtttttggggttagattgggtgttaggtttgtggtttttgtgaggtgtgttttgaatttttgttttttttttgttgggaatttgtaaagggaagtgggggaagggtattagattttttgaggtgtaatttatattaaatttattttttttaggtgtatttttttatgaggtttgataaatattatgttttttgttattattatgattgagatatagaatatttttattattttagaaagtttttatttgtttttttgtatttagttttttttattttttttattttttggtatttattgatttgatttttatttttgtaagtgttgttttttttagaatgttatataaatggaattataggttatattgttttttgtgtttggtgttttttatttagtataatgtttttgaaatttatttatgttatttgtgtttgtagtttgtttttttttattgttgagtagtattttattgtatggatgtattattgtttatttattttttagttgtggattttagggttgtttatagttttttagttatattattagtgaagtattgttttagttatattattaatgaaatttgaaatatttgagtataagtaaagaggtttttaatgattttaatagtatggagttttttattttttattttatatttaagtaaatattggattatgatttaaagattattaatgtttttgttaatttagatg

SEQ ID NO: 319 - DNA, 4001 bp, Artificial Sequence
  chemically treated genomic DNA (Homo sapiens)
tatttgagttaatagaaatgttagtggtttttgaattataatttaatgtttatttggatgtggagtaaggggtgaggaattttatgttattaagattattaaagatttttttgtttgtatttgaatgttttgagttttgttaataatatagttaaaataatgttttgttaataatatagttaaaaaattgtaaataattttgaggtttataattagaaaatggataaatgatggtatatttatgtaatggaatattatttagtaataaaaagaaataaattatagatataagtaatatgaatgaattttaaaagtattatgttaaatgaaagatgttagatataaaaggtgatatagtttatgattttatttatatggtattttggaaaaggtaatatttgtagggatagaaattaaattagtgggtgttagggaataggaagggtggagggggttgaatataaaggagtaggtaggaattttttaaggtgatgaaaatgttttgtattttgattatggtgatagtaaaaggtataatgtttgttaaattttatagaagagtatatttaaaaagggtgaatttaatgtaagttatattttaagaaatttaatattttttttttgtttttttttgtgagtttttaataaagagggagtagaggtttaaagtgtgttttatagagattgtaggtttggtgtttagtttgattttggggattgtagttattttgtggagtgggaggtaagggaaggatgttttgggtgggaaaggaagttgaggttgtgtttatattgttaggttggagggaaagtttttattgagttgttgtagagagatgtggtgaagggaagttttagttattgttgtgatattttagttttgtgttttatatttttggaggttttttattgatgttttttttgatggagatttttttgatgtgggtttttttagagttggttgagaaagatgggtagttttttttgggtggggtggttattttttagttttgtggtggtttagagtttgtttggtaaagagggttgggaggtggttatgggtgtgtgtattggagtttgtggtgttgttaagttagattttgatttgttgggttagttagtgagtttattggtttgttggtgggtgttggggtttgattttggtgtgtggaggtagttgaggatattggtgggtttgtggggtggttttgttttttttaagttgtgttttttagttgttttttggtttttgtttgtttttagtgtgggtttttgtgtgtgtgttttgtatgttaggttatgtgaaggttggggtggggttgtgtgtgtggtggaaggtttttattttaagtagttaggtgtttgggtagggtgtgggaagaggttttggagttgggtggggaggaagggtggattttagaggtttgagggtgttggagggtagagggtgttatttgtagtgggttgtgttaggttttggaaaatttgtttttttagtgggtttgttggagatgaatagatgtgtttggatagaattggatagatttaaagttttgaatttatttggggagaaggtattgtgtggtaggaaaattaaatggatttattttggttttttagtttagaggaagattattaggtgaagtgttgtttttgggaattgtattgtttatttagagagttaggttgtttttttttatgtgttttttattaattaatgaagtttagtgttagaaatattgttattagtttatttatttgttagtgggaaaataggtattgagaggttgtttgttttaagtgttaaagttagtaagtgaaattgggatgggaatttaggtagttagatgttatttataggaggtttttttagattttttatattgttttttatttgatttggatgtatgattatgttgtatagaagttagtatgttgggtaggtaggtttttgtttagttgttaatttagtttgtttgatatttggtatataggtaataaaatgtattgtatgttgaatttttgaatgtttatttatgtgttatgtattttgttagaatatttatttagatgggataaatgtagtgtaggatttgttttagttagatgagtgtatttttagttagggtaaagatttaatgaggtaagagaatagggaattagggtaattaagggttaaggtataagtaaaagaatagtaggtgtagtaatttttaggtaagattaggtagtatataggttatatttttatttttgtgattataagatagaagtttttatattgtttttgattgtttttggttatttttattttagtttttgattggttgtaggttaattttttatagggtgtaattaattggatgattgtaaagggtatttagggatttattaaatttttttagtttagtaatttttaagaatattgtaattgggatttttgaagtatttggtttgttttaataaatttgtgtttttgttattttgtttttttgttgttttgttttttgttgttttttttgttgttttgtttttatgttttgtttaattttttgtttaatatgttaaaaatttagataatttagttaagattttttatttagtaatattaataaattggatattatttagtttggaagttatttggtttaaattgtttatagaaattaaaggttttgttatttttttttatattgtaattattattagatttgaaatgtatttaaatgtgtagttagaaggggaaaatggtgattttatttttagaaataaagagtagaaattaaaatgtgaatttttggggattatattttttaggattaaatagtaagaattattttatgtaattgttttatattattttgttatgtaattattttgtatatattatttttatttatttttatagtgattaatagtaagattttaggaatataagaggtttgaagagttgttattaggtatagtaaggaagttgggagaaaggtgttgtggaagttaataggtattatattttatagttaagtttgggggaaaatttatgaaatggtaagagtattggtagttattgagaggaggaaggtaagttttttgagatttttaataggaaagtagagttggttttggatggatgttataaagaggtttggggttaaggagtagaaatttttaagtgtggtttttataaaaaagatttatataagaagtattttataatgatgaagagtttaagtattggaaaatgaaagattttaaatattagttttattagtttttggttgtaaaaatttgaatttatttgagtttaagagtatattttgaaaaatataaatgtgggaggttgaggtaggtgaattgtttgagtttaggagtttgagattagtttgggtaatatggtaaaatttttgtttttataaaaaatagaaaaattagttaggtgtttgtagttttaattatttgggaggttgaggtgggagaattattgaagttagggagttaaggttgtagtgagttaagattatgttattgtattttagtgagattttgttttaattaataataataaagtaaatgggggaagtaaagaatttagtttttttggtattaagtttagtataattttttatttttttatatgatttgggggtaatataaggagagaatagagaaaagtattttttaaaatattttgatttttggtttataattttttatttaaaattttggtagttagatgttttagaatttaaaatttttagaaaagatttttagaaaagaaattttaaattttggaattggttggatgtagtggtttttgtttataattttagtattttgggaggtattttggaatgtttgagtttaggaatttgagattaattagggaaatatggtgaaattaatagaaaaaatataaaaattagttggttgtggtggtatatatttgtggttttagttatttaggaggttgaggtgggaggatggtttgggtttgtaaagtt

SEQ ID NO: 320 - DNA, 2501 bp, Artificial Sequence
  chemically treated genomic DNA (Homo sapiens)
ttataggaaaaaaatttattattgatgattttatttgtgtgttgggaataagtaaaagaaatgttattttttaatttgtggtagagttgaagaagtaaatggattttgagtaagttggttgggttttttgaggtaataagattttaatgtgagtatgggataggggaatggttattgttgttgttgttggtaatttatttaggggtttgaggaattggtttttttgaagtttagttaaaaaaatattaggttttggttgggtgtggtggtttatgtttataattttagtattgtgggaggttgagataggtggattataaggttaagagattgagattaatttggtttatatggtgaaattttatttttattaaaaatataaaaatgagttaggtatggtgatgtatatttgtagttttagttatttaggaggttgaggtaggagaaattgtttgaatttgggaggtagaggttgtagtgagttgagattgtattattgtatttaagtttggtgatagagtgagattttattattgggtttttgggaataattttaaataatggttttatttgattttgaaattggttttattatttagttgatttagttgattttataaattttgtgtttttggtaagattgtttgttgtgttggttaggtggaggtattttttgttagtgattgtaggttttattgttgtttttttttatttttataggtataggatttttaaagaatagtggtggtttaagttatggttttttatgaaaattttggttaagtataaggttagttatgatgtgttggatttaggttagttggaatatgtgtagttttggagtgtttgatttagttttgtttgtatgtgtttgtagttattgtggattgtttgtttttgtaatatttaagttattttattagtattttatgtatgtattattgatattaatatttaattggtgagtgtttatttgttttatttgttttagtgtgtgttgtttgtggagtgtgttttatgtttttagatgtgtatatgagtagaattaattaaatatttgtttatgattttaatagttttttgttttagttttttaagtaggagattagtattttaatttatgggtggttattaaaggtttttttagttttgtgggtaaagattagtaaaatatttttatagggattattgaattatgtatatgttatataaggagaataaagttaggagtttatataggttaaggggaaggttatgtttatttattattttatatttgttatgtgttagtttttatttatagtagtaggttgggattttgggttttgattttaggtttttgtttttttttgaaagtaaaatatgaattttagttatttgtttttttgattgtaattttagttgtatgttaaaattattaaggggtgggtggggtggaggtgggtttaaaaatttgatagttagttttttttttaggttaagttatagtttttgttgggatttaggttggaattttttggaagatttttgttagagtagatatggttgttgggatgatagttttgttgttttggtgggttttttttttgtagggatagtgtttttgttttttagttttagtttgtaagagagaatagttgtgttttagaaatgggggtagagagttgggtggagggagaggagaggttaaaaataaattttgtttgggaaattagagtttgatagttaagaaagagttagtgtggaggtttttttttttggttttgtaatgatgaagtaagtgtttatttattttaatttatttgttttttaggatggtttttatgtagttgttgtggtgaatttttgtttggtggatatttttttagggttttggtgtgatggagttttttgaattagtgtaggtagatgtgggatatttttgtgtatttttttattttatttttgtttttaaataaaggttttaaatgttgtttaaaataatgatttaagtagaggttaagttagagttgttttttatttttagatttttaaatattttagaatgaggtaaaatgagtttgttagtataaagtgaaaattttatatggtgtatttttggtgttttatgtatgattattttaatgaatttttttttggttatttttaagatagatttgagtttttgatttgttagttaagggttttggtgatatttaatgatataatatttttggaaaaagtagtagtatttttgattttttatatttagtttggaggtgtattgttttgggtttttgtgtagttgagtgttatggttgtttattggatgatttaggatgggtttttggtaatttttgggtttttgggtttgaggatggttaggttgtgtgtgttttttttagtgttgaggtatttgagaggaaggtaggtgtggttagtaaggattggtttttgtgtgagtgttgttagagttagtatgagggtttttagttttagatgttgttttttttgttttttat

SEQ ID NO: 321 - DNA, 2501 bp, Artificial Sequence
  chemically treated genomic DNA (Homo sapiens)
gtggggagtgggggagatagtgtttgggattggaagtttttgtgttgattttaatagtgtttatgtagaagttagtttttgttgattatgtttgttttttttttagatattttggtattgggaagagtatatatggtttggttatttttggatttgagaatttgaaaattgttaaggatttattttggattatttaatgagtagttgtggtgtttgattgtataggagtttgagataatatatttttgagttgaatatgaaaagttagaaatgttattgttttttttaagaatattatgttattgagtgttgttaaagtttttgattggtgagttaaaaatttagatttattttaagagtgattaggaagaggtttattgaaataattatgtatgaagtgttaaagatgtattatgtagaatttttattttgtattggtaggtttgttttattttattttagaatatttaagaatttaaaaataaagggtaattttgatttaatttttgtttgagttattattttaagtagtatttagggtttttatttaaaaatagaagtaaaatgaaaaggtgtataagggtgttttatgtttgtttgtgttgatttaggaaattttattatattgaggttttgggggagtgtttattagatgggagtttattgtggtggttgtatggaaattgttttgagaagtaagtgggttggggtgagtaagtgtttgttttattgttatagagttagaaaggaaagtttttgtgttagtttttttttggttgttggattttgattttttaaatagagtttgtttttggttttttttttttttttatttagttttttgtttttatttttgaggtgtagttgtttttttttgtagattagagttaagaggtagaaatgttgtttttataggaggggggtttattagggtagtagggttgttattttagtagttgtgtttattttggtaggagttttttggagagttttaatttaggttttagtgaggattgtggtttggtttggaggagaagttggttattagatttttgaatttatttttgttttatttattttttggtggttttaatatgtagttaggattgtaattaagaggataagtaattaagatttatgttttatttttaaaggagagtaggagtttggggttgaggtttagggttttggtttgttgttgtggatggaaattgatatatggtagatatggaatggtgagtaaatgtggttttttttttggtttgtgtgaatttttggttttgttttttttgtatgatgtgtgtatagtttagtgatttttataaaaatattttgttaatttttgtttataaaattgagaaaatttttagtagttatttatagattgaggtattaattttttatttaaaaaattaaaatagaggattgttggagttataggtaaatgtttaattaattttgtttatatgtatatttgaaagtatgagatatattttatagatagtatgtattggagtaggtggggtagatgggtatttgttgattaggtattaatgttaataatatgtgtataaagtgttgataaaataatttaagtgttataaaaatagatagtttatggtggttgtaggtatatgtaggtgggattgggttagatattttagggttgtatatgttttagttggtttgagtttgatatgttatagttggttttgtatttggttaggatttttatgaggggttgtagtttgagttattattgttttttgggaattttgtgtttgtggaggtaagaggagatagtagtgaggtttgtagttattggtgggagatgtttttgtttggttagtatagtgagtggttttgttagaaatatagggtttgtagggttggttgaattaattagatgataaagttaattttaggattaaatgaaattattgtttaaaattatttttgaagatttagtggtggagttttgttttgttgttaggtttgagtatagtggtgtaattttagtttattgtaatttttgttttttgggtttaagtgattttttttgttttagttttttgagtagttgggattataggtgtgtattattatgtttggtttatttttgtatttttagtagagatggggttttattatatgagttaggttggttttgattttttgattttgtgatttatttgttttggttttttatagtgttgggattataggtatgagttattgtgtttagttaagatttagtatttttttaattgagttttagaaaagttagttttttaaatttttgaatgagttgttgatagtaatagtaatggttatttttttgttttgtatttatattggggttttattgttttagggaatttagttaatttatttaaaatttgtttgtttttttagttttgttataggttgaaaaataatgttttttttgtttatttttagtatataaatggaattattggtggtaaattttttttttataa

SEQ ID NO: 322 - DNA, 4001 bp, Artificial Sequence
  chemically treated genomic DNA (Homo sapiens)
ttatggatagtttggagtttaaggtttttgggtgagtagatagttggttaaaggttagtttggagttaaagagattagatttttgtttagattgttatatttgtattattttaaatttgttttttttatattttgttatgggggaagaggtgttgtttttttttagtgtttttttttttaggatttttttattttgggtttagttagaatttttatttgggaggtttagttttatgtgtttatgaaggtttagtttttttggggagtgattagttgtttaggagaaatttttgtatgtagaagagatttataggtttgggtttgtaggtatgaattttggaaattggaagagtttggtgtatttatattaggttttaattttttatttgatggttggtagtaaagagttaatgtaaggggtagaagtttgtttaaagtttagatatagtttgtgaagagagagttttttttaagaattaggtttaggttgggaggaatgtggggggagtttgtagtttttggtttagtttttttttaggggagtggtattttagtatttatttggtagattttagttggataattgtttaagatgtaaagggagaatgggtggaaagaatagtgatgtggaagaggtttgggatattggtttaagatatatagaaatgtgagttgggtttaggggatagttgtgtagagagatggggtatgttgatttggtaggttaaggttttgtggttgttggttttattgggtttttttgttttatgaagattgagtattttttttgtttttagttaattgttttgtttaggggtataggagatagtttttaagttttatagttatagggtttttattagttgaaatagatttgtttttttgttatttttttttgtagttttaaatttgttgttggaggtggtttttgttgtgttatgttatgagtaaagagtgaagagagttgtgtttatagtatgaaggggtttttttggttagtgtttaagtttttttttttggatatttttagttttaaagaatagttataaggttatttattggttgaggaagttattggagaatgggagttttggaatttggttgttgagtgatagtatttttgaattatgtgttttttgtttgttttagttttttttttattttttattttagggaggatgtagggattggttagaatggaggaagagttggaaagatttgtgggttttagttttttattgtaggttgaaggtgggtagtggagtatatagttttgttttttttaaagtatggttagtttagattgattttttttatttggtttttaaagtttagtatttttttaaagttatttattttttttggttttgtggtttggattaagtttatttttattttgtaatttatttttttatttttttttttttttttttaaattttagaaaatatatatggtggggaagttaaggaaatttttattggtttttttttttttttgttgttttgtgttaaagttagaatggaatagttagttttttttttttttagttttttgtttttttttatattgattttggttggaattatttattttattgtttttttgtatttaaatttttttgttattatttttttttgttattttttattttagttttttttttgttttgttagtatggagagtgagggaggtttttaaaaatgtatattttgtttagatgaaaggaaaaggttggggtgggattggtggatttattgtggatttgttgggtttatgtggtgtggtgtttggagattgtgattttttgagggtttaaagattaaaatgggatggattgaggtgtgtgttgtgtgtattatggagggttggtttttgtttggtttggtgggtgtagatgaatatatgtggggaattattgttaaatttagtattgtgttttataaaaaagttgagtttattgtttatgggaaattttgttttgaggtaggtaaaaatgttattatgggttgtattaggagaatatgggtttttttagtttttttagaatgaggaagttttttaatgtttttataggaattattttgaaaagttaatgtaaatttttgaaagaaaggaagaaagaaaaaaataaagaaaaagaatagatttatatgtttatatatgattatatggagttttgtagataaatatgagtttattttttttttttagtttatttttttttatagaggttgttgtgttatttataaattgaattaaatgagggttgaaatggtatgttttagtatgtattgtagttattgtggaagaataagtttttttaatattggggtatgtattgatttttaaaaaatgtttgtttggggaatgaaatatgtatatgtattttatatttatagatttgtttttgaaaatttttttatttaatattatttaattatgaatttgttttgtttttagaggaatggaatgtattttagtttttataaatttggggagagataatattttgtttaggtaagaggagaggaagtttaggggtttagttgtttatattgttggttagaggaggagatagatttgggagaggttttggagtgttttgtttttttttttttttttttgattaatttattttgggaaattttaatagtgttattgattgttatattttgggttgtattttttagtgtttattttttttgattttaggttagggttggatgtgaaagttgggtttttgtttggttttggtgtatgttttttttgtttatttgtttgtttttttttttttaattttatttgttttttttttttttttatataaatatttttttttttttttttttttttgttttttttttttttttttttttgtttatttaatttgttttaaaaagaaaattatttaaagggggggggtgtttttttagttttttgtatttttgttgttgttatttttgaagttgagtttttgttagagattttgaggtttttagtttttttaaatagatagatatatattttttttttaaatgagatgaaatgagtggtgttttggggtggagggaggtgttggttggagttggggttgggggtgggagggggtgagggaaaggttggggggggatgtattatttaatgttgttgttgttgaaggtgtggtattgaaagtttttgttaatgtattttatgtttggtagttttattttgtatttgtttatgtattagtagatgttatgtttgtggttatgggaaggtttgtattggggtgagtagagtaataggtggtgaggatggttgtattttagggttttgtttttttttgttttgttttttgtttattttaaggtaagatttttatttttagagagttgagggtattagatttgatttttgggtttttggtgtttttattttatggaaagatttagggaaaatgtgaatttaggtagtttatttttggtaagtttttttaattttttttttttttttttttttttttagatatggggttttgttatgttgtttaggttggtttaaaatttttgagtttaagtgatttttttgttttagtttttggagtagttgggattataggtgtgagttattgtgtttggtttatagttttgttttaaatattatttatttgagtttttttaatgtgaaattttgtagggatttttaagagagttatgatttaataataatgatgatggtaataataataatagaaggaggtatgatttgtggtgttattatgtagtagatattatttaatgtttggtaggtagtaggtattgttttaagtgttttataaagattaattatttattttttatttattattttatataagggtttggaggtatagagatattaaatggtgagtaataggatatagttagtaagtggtagagttaagatttgttttagtgtggtttggtttttatatttagattattggtgtttttaaagtagtattagggttatgtgttta

SEQ ID NO: 323 - DNA, 4001 bp, Artificial Sequence
  chemically treated genomic DNA (Homo sapiens)
tggatatgtgattttgatgttgttttaagggtattaataatttaaatgtaagagttaggttatattggggtaaattttggttttgttatttattagttgtgttttgttatttattatttaatgtttttgtgtttttagatttttgtgtaaaatggtgaatgaggagtgagtgattggtttttgtaaagtatttagaatagtatttattgtttattaaatgttgagtggtgtttattatatgataatattataaattatgtttttttttgttattattattattattattattattattggattataatttttttgagaatttttgtagagttttatgttgggggaatttaaatgggtaatatttaaaatgggattataagttaggtatagtggtttatgtttgtaattttagttattttagaggttgaggtaggaagattatttgggtttaggagttttagattaatttgggtaatataatgggattttatgtttgaaaaaaaaaaaaggaaagaaagggattgaaggagtttgttaagggtaggttgtttaaatttatattttttttgggtttttttgtgaaatggggatattagaaatttaagggttgggtttagtgtttttaattttttggggatgagagttttgttttggggtagataagaggtagggtagggaggagtagagttttggggtgtggttgtttttattgtttgttgttttatttattttagtgtaaatttttttgtggttgtaaatgtggtatttgttggtgtgtggataagtatgggatgaagttgttaggtatggagtatgttgatggggatttttagtgttatatttttgatagtagtaatgttgagtgatgtgtttttttttaattttttttttatttttttttatttttagttttgattttagttagtgtttttttttattttaggatgttatttattttattttatttaagggaaaaatatatatttatttatttgaggaaattgaggattttggaatttttagtaagggtttaattttgaaaatggtaataatagagatgtaaaaagttaaaaagatattttttttttttaaatggttttttttttgaggtaagttggatgaatagagaagggaagagaggaagaatgagaggaagagaagggaaggaagtgtttgtgtagaagagagagaaagatgaatagagttaggaaaaggaagataagtaggtgggtaggaaggatatgtattgagattaggtaggggtttaatttttatgtttagttttggtttggggttgggagaggtgggtgttagaagatgtagtttaggatgtggtaattaatgatattattggggttttttaggatggattggttagggggagaaaggaaaaggtaaaatattttaggattttttttggatttgtttttttttttagttagtagtatggatagttggatttttgaattttttttttttttatttgggtagagtgttgtttttttttaaatttataaaaattaaaatgtattttatttttttgaaagtaaaataaatttataattgagtgatattaaatagagaggtttttggaagtagatttgtgaatatgaaatatatgtgtatattttattttttaggtagatattttttagaaattaatatatgttttaatattggaaagatttgtttttttatggtgattatagtatatgttgaagtgtgttgttttagtttttatttaatttaatttgtaagtagtgtagtagtttttgtgggggaggataggttgaaaaaaaaaagtgggtttgtatttatttataggattttatatagttatatataggtatataaatttattttttttttttgttttttttttttttttttttttttaaaggtttgtattaattttttaaagtagtttttataggggtattgaggagtttttttattttgggaaaattgagaaaatttatatttttttaatataatttgtaatagtatttttgtttgttttgaggtagagttttttgtgagtaataaatttagtttttttgtggggtatagtattggatttgatagtgattttttatgtgtgtttatttgtatttattgagttaggtagaggttagttttttgtggtgtatatagtatgtgttttagtttattttattttagtttttaaatttttaggaagttatagtttttggatattatattatatgagtttaataggtttatgatggatttattagttttattttagttttttttttttatttgaatagaatgtgtatttttggaagttttttttattttttatgttggtagagtaggagggagattgaagtaagagatggtagagggagatggtggtaaaaaggtttagatgtaggagaatagtaagatggatggttttggttagagttgatgtggggaggaatagagggttgaagggagagggggttgattgttttattttagttttggtataaagtagtagaaagggggaaaagttaatagaaatttttttagtttttttattatatgtattttttaggatttgagaggaaagagaggaaaatgggggaatgggttgtaaaatagaaatgagtttaatttaggttgtagagttagggaaggtgagtaattttaggagggtgttagattttagaagttagataggaagaattagtttaaattggttatgttttggaagggataagattatgtgttttgttgtttatttttagtttgtaatgagggattgaggtttatgagtttttttagttttttttttattttggttagtttttgtattttttttggggtggaggatggaaggaaagttgggataagtagggaatgtatgatttagggatgttgttatttggtagttagattttgaaatttttattttttaatgatttttttaattaatgggtggttttgtgattgttttttaaggttgaagatatttaggaaagggggtttggatattggttaaggagatttttttgtgttgtggatatagttttttttattttttgtttatggtatgatatagtggagattgtttttaataatgaatttggggttatgaagaggaatagtgaaaaagtaaatttgttttaattgatgggaattttatagttatagaatttgggggttattttttatgtttttggataggatagttggttggggataggagaagtgtttaatttttatgagataaaggggtttgatagggttagtagttataaggttttgatttgttgagttagtatgttttatttttttgtatagttgttttttaaatttaatttatgtttttgtatgttttaggttagtattttaaattttttttatgttattgttttttttatttattttttttttgtattttgagtagttatttaattaggatttgttaagtggatattggggtgttatttttttgagaaaagattgagttaggaattataagttttttttatattttttttagtttggatttaatttttgagaggggttttttttttatggattgtgtttggattttgagtaggtttttgttttttgtgttggttttttgttgttagttattaggtgggggattagagtttggtgtaagtgtgttagatttttttggtttttaaagtttgtgtttgtgaatttaaatttgtgagttttttttgtatgtaggagttttttttgggtagttggttattttttagagaagttgggtttttatggatatatggaattaagttttttaaatgggagttttggttgagtttagggtggggagattttgggaagggaggtattggaggaagatggtatttttttttttatggtagggtgtgagggaggtaggtttggaatggtgtgagtatggtaatttaagtaggggtttggtttttttgattttaggttggtttttggttgattgtttgtttatttagagattttggattttggattatttatgg

SEQ ID NO: 324 - DNA, 4001 bp, Artificial Sequence
  chemically treated genomic DNA (Homo sapiens)
agttttagtgatttgtttaaagttagagaattaataagtattaagtagaagattaagagaagagtttatattagtaatatttagttaagttattttttttttgttttatatattagggttttagtgggtattttttaaaagttgatatttgttattttagttttttatttataaagtgggatgataatataatatatttaaatagttgtatgtttttttttttttttaattaaatagggtagagatagtgtatttgaaaaaaaattgtattagaaagtgttttttgtttaaatggtggttattattttatattttggttgtattttggaattatagtaggtagttttgtgtgtttgttgatttttatttatgggaaatgtgtttgtttatattatagtgtattatttatttttttttttaatatttatgtggttaaattatgaattgttatattaataagatgtaaatatatttgagagggtggttagatttaattgtttttataaagttgttttaatagttgttttttaatagatggatagtttatatttggttatgtttttgtgatagtgtgatgattgaattttttaatagatggtatataaatatttgggaaaatatttttttaatattaattgttataaaaaagatttttagagtgttagaaaaatgatagtttgtatttttaagtttttagtttttgttattataatttagatgatttggaagtttttatttttggtatgtggatttgttttataaatgagtatatatatttgtattagagtgaaatgatgaggaatattttgttgttaattagagatttaatatagatatagtatttaaatttttttttgtttgttgatagatgtatataatttttttttgttgagttattttatttttattttatatatagaaaatataattttttataagaattaattgttagatatttatgtattttttttaaaaagtattgatttaaaaaaaattattaaatttagaattttaaatatgtttattaatgtgatgaatttattagttttttaagttgttttgtgtttgttgttgattatttagtatggtttttggaattggtaagtgaggaatttgataataaatggggtaggaaggagagttatgaaaatttgtgatggtatttatgattgttataatgataaagggtatttattgatatttagtgggtgtaaattagagtatttatatatgttatattatatagtatagttttaaataagaaagaaatgttttatgttttatattaatttgaatatttggttggatatttatttgagtttggaatttaattttgtttaaatgaaatgatagagtaggttttgtaatatatggtatttttgtagagttttagtatttataaaatattaaatgttagtatttatttttatttttgttttttgattttattatattgttgtataaaaggttgaaagatttttgatttgattttattgtttttgaattttgatttttttatgttaaataagtgtaagtatataaatttttttttatattttttagtatagttatagattgaatatttatttagtaaatagatattatatgtttatttttttattttttttttttattttaaatagattattttttaatatttaatttttgatatttttaaaatttgtgtaagttatattatttagggatttttagatttaaagagaaaattatagaatgtttgttattataaaggggttttgaaattgattgggatgagaagtattattatagaaaattaagtaatataagataaattatttttttatttgtttttttgtgtatatattagtgttggaattatttaaagaaaaggatagggttgtgattttaagtttttaatatagaatgtagttttaataaattttgtattattttgtttttatggatgttttaaattgatttttttttggtaagttgtattagttagtttttttttgtatttgttattgtagatggtgtttaatgattgttttagtttgaattattttggtaatttttgtttaggggatttgattgaagtgttttgttttggttattagtattgggttttgtatttgggtgatggttatgttattaatatagtatttgtaggtgaggtttatttttagtggtttttgggagtaaagttttagtgtttttgttataggaagtaattatgggtgaaataataaataaaataaaattgaaataaaatatagaaagtagataaatttaattaatttaggtttagagaaggatattttaaaattaaagtagtattgaagaaattataaaggttaatttatatgaaattttaaaatttttggatttaaaaaattataattaaaaagtaaataattagttggggaaaatatttgttataaatatggtaaggtttagtgtttttatgttttatataaataggttattttaatttatttaatatttatttatagattatttagtatgttttgaatgttattttaagtgttgggggtatatagatgtttttttgtatggtggagtttatattttagtaagtagggatagattatgagtaagttatagaaatgttaaaattgtgataagtgatatagaaaaaataagaaggtaggatgagaagtgttgagggtagaaggtggtgggtgtagatgttgtgattttaaatgaagtggttaggaaaattttttaagaaagtgatatttgaggaaaaatgtaaaagaggtaaagaaattggttagatgttttttagagatatagtattttaggttaaggggatagtagatattaaaattttaataaataaatggataaagaattaggaatagtttgtaaaagaagaaaagtaaaagttaatatattttttgaaaaaattttaattttttggtttaggaattgtaaaataaattaataaaatattttatatttattttattagtaaaggttaagtgataatgattagtgttgataagaatatagtgaaatgaatataaaggtattgttgatggtaatataaattgataagggttaggattttaaaagggtttgtattttttgattttgtaattgtatttttaggaatttattttggggaaatatttagagatgtagataagtatttttgtgtaaggatatttatttttgtgttatttataatggttaaagtagataatggtatatttttaataggggaatggttaaatgaattaagatttagttatatgatattagttattaaatattttttattgagaaatttttattgtattatggagggaaattgtagaaagagttgaggtggtgttggttttagagatgtttatatttaggggtttaattattatttagattttttgttatatatttgtatttttttttatgtgttgtttttatttttttggattatgtttttttaaaaaattaaattgatgattataagtagttttaggttttgatttttaggtttttttgatttaatatgaaagagttaattgtaattatttgttatagttaaagaattatggagatagattttaattattttagtgtgagttttatgtttattgttggattattattgtgtttaagagaatggaatattgtgattggtttagatataattgtttttaggaataaataggtaatggtgggatttggtgttggatagatataaataatagtatttataatagttattaaaagttttatatttggatatgttttattgtagggaagatggttttaatatgatatttatttgaaaaagattaattatatgtttagttataaagtaagttttaataaagttaaaaaaattgaaattatattaagtatatttttgaattatagtgtaataaaaatagaaatgaatataaagaagattttttaaaattatataaaaatatggaaattaaatagtttggtttttaatattgatgagtgatgtttaatatttagtgtta

SEQ ID NO: 325 - DNA, 4001 bp, Artificial Sequence
  chemically treated genomic DNA (Homo sapiens)
tgatattagatattaagtattatttattgatattgaggattaagttgtttaatttttatgtttttgtatagttttgagaaattttttttgtatttatttttgtttttattgtattgtggtttaagagtgtgtttggtatgattttagtttttttgattttattgagatttgttttatgattaagtatgtggttaattttttttaaataaatattatattaagattattttttttgtaataaaatatgtttagatataagatttttaatggttgttatggatgttgttatttatatttatttagtattaaattttattattgtttatttatttttggaaataattgtgtttgagttaattatagtattttatttttttgggtatagtgatagtttagtgatgaatatggggtttatattggagtgattggagtttgtttttgtgattttttaattgtaataggtagttatagttagtttttttgtgttggattaaaagaatttaagagttagaatttaaagttgtttatggttattagtttagttttttaaagagatatagtttggggaaatgaagatagtatatagaaaaaaatgtagatgtgtgatagagagtttaaatagtggttaaatttttaaatataggtatttttgaggttggtattattttagttttttttgtagtttttttttatgatgtaatgaagattttttagtaaagaatatttgataattaatattatatggttaaattttaatttatttaattatttttttattgaaaatatgttattgtttattttaattattataaatgatatagaagtgaatatttttatatagaaatgtttgtttatatttttaaatatttttttagaatagatttttagaagtataattatagggttagaggatatgaatttttttaaggttttagtttttattaatttatattattattaataatatttttatgtttattttattatatttttattaatattgattgttattatttaatttttgttaatgagataggtatgaaatattttattggtttattttataatttttaggttagaaagttgaaatttttttaaaaggtgtattagtttttgtttttttttttttataaattgtttttaattttttatttatttgtttgttgaggttttagtgtttgttgtttttttgatttgggatattatatttttagagagtatttgattggtttttttattttttttatatttttttttaaatgttatttttttaagaaatttttttgattattttatttaaaattatagtatttgtatttattattttttgtttttagtattttttattttatttttttattttttttgtattatttattataattttaatatttttgtaatttgtttatggtttgtttttgtttattaaaatgtaaattttattatgtagggagatgtttgtatatttttagtatttagaatagtatttagaatatattaggtgatttataaataggtgttgaataaattgaaataatttatttgtgtgaaatataaagatattgaattttgttatgtttgtggtaaatattttttttagttggttatttattttttaattgtgattttttaaatttagaggttttaaaattttatgtgaattggtttttgtgatttttttaatgttgttttggttttagaatatttttttttaaatttagattagttggatttatttgttttttatattttattttgattttgttttgtttattattttatttatgattattttttgtaataagaatattaaaattttgtttttaggagttattggaaataaattttatttataggtgttatgttgataatgtaattattatttaagtatagggtttagtgttgatagttaggatggaatattttgattaagttttttgggtaggggttgttagggtagtttaaattgaagtaattattaaatgttatttgtaatgataaatataaagaagagttagttaatataatttgttaaaagaaaattagtttaagatatttataaaagtagaatgatatagaatttattgagattgtattttatattaaagatttagaattatgattttgtttttttttttgaatgattttaatattgatgtgtgtataaggggataagtagagaaataatttgttttgtattatttaattttttatagtaatgttttttattttgattaattttagagtttttttataataataagtattttgtaattttttttttaaatttagaaatttttggataatataatttatatagattttaaaaatattaaggattaaatattaaaaaatggtttatttaggataaaaaggggaaataggaaagtaaatatataatatttgtttattaagtaaatgtttagtttatgattatattaaaggatataaaaaagggtttatatgtttgtatttatttagtatgaaaaagttagaatttaggagtaataaaattagattagaagttttttaattttttatatagtagtatagtaaaattaagaagtagaggtaggggtggatgttaatatttaatattttgtgagtattaaaattttgtaaaaatgttatatattataaaatttattttgttattttatttaagtaaagttgggttttaggtttagatggatgtttagttagatgtttaaattaatgtaggatatggaatattttttttttgtttaaaattatattgtgtagtgtagtatgtataggtattttggtttgtatttattaaatattagtaaatgttttttgttattgtaataattataaatgttattatagatttttatgatttttttttttgttttatttattgttagattttttatttattgattttagaagttatgttaggtggttaatagtagatgtaggataatttggaaagttggtgagtttattatattgatgaatatgtttgaaattttaagtttggtaattttttttaagttaatattttttagaaagaatatataagtatttgatagttgatttttatgaaaggttatattttttatgtatggaatagaagtagaatgatttagtaagaggagattatgtatatttattaataaataaaggaggatttaaatgttgtatttatgttgaatttttaattgataatagggtgttttttattattttattttaatgtagatatatatgtttatttatgaaataaatttatatgttagaaatagaaatttttaaattatttaaattataatagtagagattaaggatttgggaatatagattattatttttttggtattttaaaagttttttttataataattaatgttagaagggtgtttttttaagtgtttgtatgttatttgttgaaaagtttaattattatattgttatagaaatgtggttaaatgtaagttgtttatttgttgaaaaataattattaaaataattttatgaaaatgattaagtttaattatttttttaaatatgtttgtattttattaatatggtagtttgtaatttggttatatgggtattaaaaggaaaaatagataatatattgtgatataaataaatatattttttatgaataggaattagtaaatatataaagttgtttgttatgattttgagatgtagttaaagtataaaataataattattatttgaatggggagtattttttagtgtaatttttttttaaatgtattatttttattttatttaattgaaaaaaagaaaaaatatgtaattatttgagtgtgttatgttattattttattttatagataaaaagttaaagtagtaaatattaatttttggaaaatatttattgaaattttaatatataaaataaagggaaaataatttgattaggtgttattgatgtgagttttttttttagttttttatttgatatttgttagttttttaattttgggtaggttattggaatt

SEQ ID NO: 326 - DNA, 4001 bp, Artificial Sequence
  chemically treated genomic DNA (Homo sapiens)
ttaggtaaattttgtatgtttatagtattgttagatttttgttgataaaataatttataattttgattttatttttttttttttttttttttttgattttgtttgaatttatgaggtttagttgtatttttaagttagtttttttgttaattagtgatttttttgttgaatatttaaaaagggattgttaggattgaataagagaattttttttagttatttttttttttttgagaaaggattttattttgttgtttaggttggtgtgtagtggtgtaattatagataattgtagttttaattttttaggtttaagttttttttgttttaatttttgagtagttgggattatagatgtgtattattatgtttagtaaatttttaattttttgtagagatggggttttattatattatttaagttagttttgaatttttgggtttaagtaatgtttttgtttcggttttttaaagtgttgggattataggtgtgagtgattgtatttagttttttatagttatttttaatttattattggtttttttattagattgtattgttatataaggaagtgattttagatagtacggtattagattagaggttgtgtttttttttaataaaggtataaatgagatgaattgttttaaggttttaggtttgttttttttttgagaagtgatttttgggaggttatatttagttaaagtagttttgttagtataaatttattaggattttgatatgtaattttgtattatttttagtaaggttaaaatggtatatgaaaggaggtggtttataaaatggattaatattaatatggaattttatgttttttaggtatttgttgtatttttggagatttaaaatgttattatggtattttaggttagattggtagtggagaaattattgtgagttattggatttgtttaagataaaattttgaatttgtaaataaattttggttagttttttttaatatttttgtggtaaataatatataatttagatttatgtaatgggtgtaagaaaattattgttttggttattttagtatgaaatttaagagaaaatttattgaagtgtttttaaaattattttgattataatttaaggtaaaatataagttaaaaaatatattatgatatagtaaatgaagttaggattgtatatatatgtttatttaagtatatgaaatggaaataatagttttagaggtagtattatgtttattatatttgaggtatttttggtattttttattttatttaattaaatttttagtattttttattttagttatatttattttataatttattaatgggttttgatttatagtttaaaaatattgttttagagaatttaaatgtttatattatttatatttataagaagtaattgttttggggtttttgtgtatttttatagtttagttttatttatttgttaagatttggttaagtgagaattgtaaagagttatgtttttaattatttaagttaggaattttttgaggtggtaggggaattagggtgagtagaaggatatattatttttatttttattaagtttatgttatagtggatgaaataaatttagaagttaaggagttttagaagagaagttatttttttgagtaattatgttaagtacgtaaatagttttagtagtgtttttttagtataaggtgtttttttttgatttaggagagttagtttaattttttttttttgagaaaatggaggtttaaagagtttgttatttatttttagtttttttattattttgagtttaagtataggattatttgtaatatatatgttgttttatatgattaagtgggttttgtgatagaaagggaatttggagttgagaagagaaagtgatgattaagttatattattaaaatgtttgatttttagatattttggaaagattttgaaggtattttagttaaatttttttttttagaaggagtttatttaattattttagataatagagaaaaattagtttttttaaagagataaattatatattatttagtgttttataatattttttgaataaatttaaaattttttatttggaatttaatttatttaaatttttattttaaaaattaggaaatagagttaaatatttttttagttattaaggtagtaaattaaagattgttatttgtataggagaatttatgatttgttttttttattattatatattttacgagtattgatttaaaaaattatgttatttataaattaattaataattgttttttttagggattgaaattttaaaattttagacgtggaggatcgattttattttaaagtaaaatttagtggatttttgtatatatatttattttaatttgttataagtttgtattttggagattagtttatgttatatatttagaggtgtaatatttttttatttgggaaaattgaaattatttagatataaaagagtggttgtagtaagaaaataggtaaggagaatattttaaagtgttgattttcggtaaagttatatataggatgtatttgggagtagatttttttgaagttattttgtgtttagagatgtttttttttattttgttgtttatgttaaattttttgtgatatgtttttagagttttatgatttttttttttaatttgtagtgggagtttgaattttttatttatttttgtgattatttagtttataagagttttcgtttttatagggtttttatttgattatagattttataaaggtagagattttatgtttattttattattattgtatttttagtattaagtattaggattaatatatagtaagtgtttaatagatgtttattggatgattagattggtattttaaggtagtttgagattatgttttagataagatattttagtttagtttaatttttattatttattagttattaaagagaaattgataattatttatgatattttttttttttgttttatagttaattttgattattttgaaattttgcgagttattgggaaaggtagttttgggaaggtgagaataaattgaaatgattaattattagtagggttatgtagtttagggaatagagggtttagaaatgtttatattattgagttgttgggatcgtaaggaaagataattaagtgaaaatgtttttgtaatggatttttataaaattgttattatagtttaagaaaagcgtgtgataggtagttatataatgaatatatattgttgttagaataattttattaaatttaaatttgtttatttttagtaaattttaaggtttttttttttattttaaaggagatgaagattttagaattatttttagattttattagttgtatgtttagtaatagttattttgtttatggaagagttatttatttttatgtgggaaagaagttattcgatttttatttgtttttttatttgtttaatgtttttattttaagaaaaatatatatttagtttaattttttttgtaagaaatttttgtatttaaattttgattattagttttttaatggagatatattttaagagaataatattttatataaaatttgtattttaaaattattttttgtttatttttttaggtattatatagatttttaaagaaattttaaaaatatggatattatatttagtgtttttttagtttttaaagttttttttggttatattatgtatggttgtaaatagaaattttttgtatagtattatttagtttgatagtttagttatgtttattttagttatttaaagtaggattaaggatgttatttgttattggaatatttttgatatggaggtagttatttttattaaaatgttgttttaaaagtttaaaaagtaatattaggtaaaattgtttgagaaaaaagagatttaagaattgaattggtgtatagaaaagaaaatgaaatttttaatttaaaattagagttaagtgg

SEQ ID NO: 327 - DNA, 4001 bp, Artificial Sequence
  chemically treated genomic DNA (Homo sapiens)
ttatttagttttgattttagattaaaaattttatttttttttttatgtattagtttaatttttggatttttttttttttaaataattttgtttggtattgttttttgggtttttaagatagtattttggtgaaaatagttgtttttatgttaggaatattttaataataagtaatatttttaattttgttttgagtgattgaaatagatatgattgaattgttaagttgaataatattgtgtaaagaatttttgtttataattatatatgatataattaaaaaggattttaaggattggaaaaatattaaatatgatgtttatgtttttgaaatttttttagaggtttgtataatgtttgaaaaagtaaatagaaaatgattttaaaatgtaagttttatatgaaatattatttttttaaagtatgtttttattgagaaattagtaattagggtttgaatatagaagttttttgtaaaaaaaattaaattgaatatgtattttttttaagataaaaatattagataaatgaggaaataaatagaaatcgggtgattttttttttatatgaaaataagtaatttttttataaataagataattattattgggtatatagttggtagaatttgaaaatgattttgaaatttttattttttttagggtagagagaaaagttttaaagtttattgagagtaaatagatttgagtttaatgagattattttgataatagtatatgtttattatgtagttgtttgttatacgttttttttaaattgtggtgataattttataaaaatttattataaaaatatttttatttaattatttttttttgcggttttagtaatttaataatgtgaatatttttggattttttgttttttgggttatataattttgttggtggttaattattttaatttgtttttatttttttaaaattgttttttttaatggttcgtaaaattttaaagtggttaaagttgattgtaaaataaaaaagaagaatattatgagtaattattaatttttttttagtagttaataaataataaagattggattaaattgaagtattttgtttaaaatatgattttagattattttaaaatgttaatttaattatttagtaaatatttgttgaatatttattatgtattaattttagtgtttagtgttgggaatatagtaataatagagtaaatatagaatttttgtttttatggagtttgtagttaagtgagggttttgtaaagacggagatttttatagattaaatggttataaaaataaatggaaaatttaagtttttattgtaagttaagaagagaggttatggggttttaagaatatattatagagaatttgatataggtagtaaggtaaggagaaatatttttgagtatagaatgattttagaaagatttgtttttaggtgtattttatgtatggttttatcgaggattagtattttaaaatgttttttttgtttatttttttattataattatttttttgtatttaagtaattttaatttttttaagtaggaaaatattatatttttaagtgtgtagtatgaattaatttttaaagtgtagatttgtaatagattagaatggatatgtgtgtagaagtttattgaattttgttttgaagtagagtcgattttttacgtttgaaattttaaaattttagtttttagaagaagtaattgttgattagtttataggtagtatggttttttgagttaatgttcgtgaaatgtataatgatgagaagaataaattatagatttttttgtgtaggtgataatttttggtttattgttttgataattgagaaaatgtttgattttgttttttggtttttgaaataaggatttagatgagttaaattttaaataagggattttaagtttatttagaaaatattgtgaaatattaaatggtatataatttgtttttttaaaagaattagtttttttttattatttagaataattagataagttttttttgaaggaaaaagtttggttagagtgtttttaaagtttttttaagatatttgagagttaaatattttaatgatgtgatttaattattattttttttttttaattttaaattttttttttattataaaatttatttagttatgtgaggtagtatgtatattataaataattttgtatttggatttaaaataatgaagagattggagataaatgatagattttttgagtttttatttttttaaaagaaaaaaattggattgatttttttagattagaagaaaatattttgtattaagaaagtattattaaagttgtttacgtatttaatatagttatttaagggaatgattttttttttgaaattttttgatttttgagtttattttatttattatagtataagtttaatgagggtggggatgatatgtttttttgtttattttggtttttttgttattttagaaaatttttggtttaggtagttgaaggtataattttttgtagtttttatttagttaggttttagtaaataaataaaattaagttataagaatatataagaattttagaataattattttttataaatatggatagtgtgaatatttggattttttaaggtagtgtttttgagttgtgagttaaaatttattaatgagttatgaaataaatgtagttaaaataagaagtattaaaaatttaattaaatagaatagaaaatattagaaatgttttaaatgtagtaagtatagtattgtttttgaaattgttgtttttattttatatatttgagtagatatatatatataattttggttttatttattatgttatgatatgttttttggtttatgttttattttgggttgtggttagaataattttaaaaatattttagtaagtttttttttgagttttatattgaaataattaaagtaatgatttttttatatttattatatgaatttgagttgtgtattatttattataagagtgttaaaaaaagttgattaggatttatttgtaaatttaagattttattttgagtaaatttaataatttatagtgatttttttattgttagtttagtttagaatgttatgatgatattttgaatttttaaggatgtagtaggtatttagaaagtatgaagttttatgttgatattaatttattttgtgaattatttttttttatatattattttaattttattgaaaatgatataggattatatgttaggattttggtaaatttatattagtaaaattgttttaattaaatgtgattttttaaaggttattttttagaaaagggataagtttaaagttttagagtaatttattttatttatgtttttattaaagaaaaatatagtttttagtttagtgtcgtattgtttgaagttatttttttgtataatagtataatttaatgggaaagttaatgatagattaaaagtgattataagaggttggatgtagttatttatatttgtaattttagtattttgggaggtcgaggtaggagtattgtttgagtttaggagtttaagattagtttgggtaatgtagtgaggttttatttttataaaaaattaaaaatttgttaggtatggtggtgtatatttgtagttttagttatttagaaattgaggtagggggaatttgaatttaagaggttgaggttgtagttatttgtgattgtattattgtatattagtttgggtaatagggtgagatttttttttaaaaaaaaaaaagtgattggaagaggtttttttatttaattttgatagtttttttttaaatgtttaataaaagaattattagttagtaggaagattaatttgaaaatgtaattaaattttataaatttaaataaaattagaaagagagagagagagagagatgaagttagaattgtggattattttgttaatagaaatttaatagtattataaatatataggatttgtttaa

SEQ ID NO: 328 - DNA, 2501 bp, Artificial Sequence
  chemically treated genomic DNA (Homo sapiens)
gtttttgtatttttatttttggtagatattttttattggttgtgattttttgttttttgttttattggatttattgtagtgaggggtagagttaggttagaattaagttttttttttgtttatttggagttttgtttgttgttttttcgttttttagtaggttttttgtattagtatttgagtatttattaaatgtttatttgttgttatgtgtaggttttgtttttgatcgtagtgtaattttttttggtttatagattatatgggaatttgtagagcgggtgtacgtagggtggggattggggtgtttattttttttttattatttagtagattattagtttagttatttgttcggatgtttaatatttagttatatttataagaaatacgtaaatatttgtttatatttcgatatagattattaagaatatatatatggttggtgttttaattgagttattttttttttattttatttatgaaagtaatataagaaagttaagagtgaaaggggtaaaagattatagtataaaggttttcggtgtgttttttaaagatttatataatattgttttaaagggaagttatagtagtttagttgttttttatagattagagaggatggtggggtagttaggagttattagtaaatttaggtgagtagtgtaggattgaatgtcgttgtttatttgtaggtgggagtttatgtggagggtgtttttttttgttttttattgggacggtgattgtgtatagtggaaagtatagagttaatgagggataggatggttgtggtggagggaaaatagtgtagggttgttttgtttttttgttttgtttcgttaggattggtgggttattataggtttttgtaaagtataaatatatatgtatatataagtatatatatatataggtatgtaatatagatatatatgggtatgtatatataaatatataggtgtgtatatggatgtgtatatttgtagatataaatttagattatacgtttgtgtatatatgtatgtgaggtaagagaatagggtttggaggtagggaatttaaggttaattcgtgttgattttttagaattgaattaaaatgaaaattttatttttttatgtttgaggaataaaaggtttagtagttattttttttgttatattttttttttattgtattttagatgaaaatggaaagtatttcggattggttttttttcgtaattaattagattggttatcggttaagtttttatgtgtaattttgtaatttttttttagtttttgattggttgttttttgcgattgattatattggttggggttatttttttatttgtatagagtataattaagtaattaatgggaaaattttggagggtatttaaattttagaaaatgttgtaattaggtttttgagttattggttttagtttgtttttattttgtggagtgtattttttttttaataaatttgcgttttcgttgtggtaatatatatatttgggtgtgtatgtaggtatatatatatgggtgtgtataaatatataggtatgtatatagtatatatatatataggggtgaacgtagttatatatatatatatatggataagttagtgaaattttgggtttgttttttttataatattaggtgaatttttttggggttttttatttaatttttttttgtttttgtttttttagttataaatttgggttagtgatataggtttttttttaatggggtgtgtggatagtagatatttgaaaatttaaagttttaaaatataagatattattttaattttaaagtatttagatttttaagttttcgttggtaaagattttattttattttttgttttgatttttaggtttgaatttttgttttgtttatttttattttttttgttttgaagatttaattttaatatataaatttgacgggttattgaattttaaaaattttttagagaatgagagaaaattttatcgcgaaggtgtggttggttattttttttttcgcgttggggtttttttgtgttagcgagtttcggtatattgattttcgattaaaagaattattatttttatttttggggaaaataggaagagggatggtgttttattaattatatatttagtttaaataagtgttttggtttttttagaaatttaaaaggtagaaaaaaatggatatatttttttttaagaagtttttatattatatattttttaaaaagtatttatattttagttgttatgtaaattaatagttttgttaattttttttttttttgttttggtattggtattaatatttttttttattgtggttttggaaatttttatattaatgaagtagtagaaaggtttattatattgtattggtgtgtggttttcgtatttttttgattttttttttttttttgtttttttttttttttttttttgagataaagttttgttttgttatttaggttggagtgttgtg

SEQ ID NO: 329 - DNA, 2501 bp, Artificial Sequence
  chemically treated genomic DNA (Homo sapiens)
tatagtattttagtttgggtgatagagtaagattttgttttaaaaaaaaaaaaaagaaagaataaaaaagaaaagaaagttaaggaaatgcgaagattatatattagtgtagtgtgatgggtttttttgttgttttattagtgtgaggatttttagggttatagtgaggaagaatgttaatgttagtgttagagtaaaggagaaagaagttggtaaaattgttgatttgtatgatagttgaaatgtaaatattttttaaaaaatatgtgatgtggaagttttttaaaaggggatatgtttatttttttttattttttaaatttttgaggaggttaaggtatttgtttgggttaagtatgtgattgataaagtattatttttttttttgttttttttaaaggtaaagatgatgatttttttgatcggaaattagtgtatcgaggttcgttgatatagagaaattttaacgcgaggaaaggaatggttagttatattttcgcggtaaagtttttttttattttttgaggagtttttaaagtttagtgattcgttagatttatgtattaaaattaagtttttagagtaaagaaaatggagataaataaaataaagatttagatttgagaattaaagtaaaaagtaaagtaaaatttttgttaacgagggtttgaaaatttaaatattttgaaattagaataatattttgtgttttagagttttaaatttttaaatatttgttgtttatatattttattggaggaggatttgtgttattaatttaaatttgtagttgagaaaatagaggtagagagaggttaagtaaaaaattttaagagagtttatttaatattgtgaagaaagtaaatttagggttttattaatttgtttatgtgtgtatgtgtgtggttgcgtttatttttgtgtgtgtgtgtattgtgtgtatgtttgtgtgtttgtgtatatttatgtgtatgtatttgtatatatatttaagtgtgtgtgttattataacgaaagcgtagatttattgaaaagaaagtgtattttatagagtgggagtaggttagagttagtggtttaggagtttggttatagtattttttggagtttaagtgttttttagagtttttttattggttatttggttatattttatgtagatgaaggagtggttttaattaatgtgattagtcgtaggaggtaattaattagaggttgaagggaagttataaagttatatatgaagatttggtcgatgattagtttggttggttgcgggaggggattaattcgaggtattttttatttttatttgagatgtagtggaaagggggtatagtaaagggagtagttgttgaattttttgttttttaggtatggagaggtggggtttttattttgatttagttttaggaagttagtacgaattggttttaggttttttgtttttagattttatttttttgttttatatgtatgtgtgtataaacgtgtaatttaaatttgtgtttatagatgtgtatatttatgtatatatttgtgtatttgtatgtgtatgtttatgtgtgtttgtgttatatgtttgtgtatgtgtgtgtttatatgtgtatgtgtgtttgtattttatagaaatttgtggtggtttattagttttaacgggataggatagagagatagagtagttttgtattgttttttttttattatagttattttgttttttattggttttgtgttttttattatatatagttatcgttttaatgagaaataagaaggagtattttttatatggatttttatttgtaagtggatagcgatatttagttttgtattgtttatttgggtttattgatgatttttggttgttttattattttttttgatttgtgagaaatagttaagttgttgtgatttttttttaggataatgttgtgtaaatttttgaaggatatatcgaagatttttatattgtgattttttattttttttatttttggtttttttatgttgtttttatgaatggaatggaaaaaagatgatttagttaaggtattagttatatgtgtatttttgatggtttatatcggggtgtgagtagatgtttgcgtattttttgtgggtgtgattggatattagatattcggataagtgattgaattaatgatttgttgaataatgaaggaggaatagatattttagtttttattttacgtgtattcgttttgtaagtttttatgtgatttgtagattaggggaaattatattgcggttaagggtagagtttgtatatgatagtaagtgagtatttgatagatgtttagatgttagtgtagagagtttgttgggagacgaagagatagtaggtagagttttagatgggtaaggaagaggtttggttttagtttggttttgttttttattgtagtggatttagtggggtagaggatagagggttataattaatgagggatgtttgttaaggatgggggtgtagaggt

SEQ ID NO: 330 - DNA, 2501 bp, Artificial Sequence
  chemically treated genomic DNA (Homo sapiens)
tgttttttatttgaaaaagataacggtagtttttattttagttgttttatttaatatgaggttagatttaggggtgtagggatgtttttaaggttattttaatagatgtgattggtattttatattgggattagttaggttttattgattaggtttatttaattagaattattttagaaggtggggttgaaatttattaaggtttttagaatattgtattttagggtaattagtttttgtatgggaggagaggagtattttttgtattattttatggtgttattaaaagttgaattatgggttggtttaattttgtagagaagagattatttattttatttgtggaaatttattttttagcgatattaatgttttttaataaatttaattttgggtttgagtgatggttggtgtaaaaaataaatttaagattttagtgttttttagaagtttggatttttagggattttgttgtgggttataggatgttatcggttttttttttttgtgggttaagtgtgggggttatgtggatttttttatgagtagatgttattaggattattggttttagtttttttttttatagttgtagtgggggttggggttaggggtattttagggagggtttttgtatgagtttgtgttatagtgttgggtgttcggcggagggattaagttgatcgttttaggtgagttttttttttttttttttttttcgtttttgggataatttttgttgtttttgtttgtttttgtattttgttttaatttgtggttagtttttttttttgtattttaggtttgagtaaggatttttgttttttttgtttagatttttgtttgttttagtaggttattataattattttatttttgatcgtaggggtaggggattagatagaatgatttattgagtttcgtttgtttgtttgtttgtttgtttttttttttttgtttgtttttttgtttgtttgataggcgtaggttgggtttttaagttttgttttgttttggtttttttagtttgggtttttgtcggaatagttttgtttttgggttatttgggttttattttttggggaattgggaataaggggtttgagggaggtattttttgggagattttagaaggatttagtgttttcggggttgatgttcgggaattatagagttgggatttagagttaggatttagatttagaatgaggtaggaggtggaggggttgttttgggcgtttgggggttgttagggattgagttttgagttagtttgagatttaggaaatttcgttaggagggagaagggagaagtagattttggatattagaaagttaggggaagggttataaaaggagtggatgtgacggaagggcgggtttttgggtttttttagaatatattttttgtgtttagggggattagaggggtagagtttattgcgtgaaagttttattgttatgattaggtagtcgggacgtggggtggatgttagaaaagattttacggaataagagagagtttaggatagtaggtaggtttttcgatttttttaggtttttgttttatatacgggttttagaatatatatttggttggaatagtttgagggattaaaaggttttagtattttatagagttgaggagttaggttagaaaagtaattttagagttcgttgtgtaggggagatatagagttttttttatttgttaggatggtaggaggggatagggttagggcgttgagggttagatgtcggtgttgggggttaaggtttcgagagattttaggataggtggttaggtgtttaaggtaaaatagtttttcgtgtagattaggatatagtggaaaatattttgatttttttgtttggtatagatttttagatatagagtttttgaataagggtattttaatattttattatatattgaggttaggggttttttaggtggatattaggattttgattttttgttttttatttatttcgtaggttagtttaaggttgttttttcggttattttgttttcgtttttttttgaggagttttaagttaataaggttatattggtgtgttttataagtgatttttattcgggagtcgtgatagtggtttggaaggtagatagtagtttcgttaaggcgggagtggagattattatattttttaaataaagtaataataagtacgcggttagtagttatttgagtttgacgtttgagtagtggaagttttatagaagttatagttgttaggttacgtatgaagggagtatcgtggagaagatagtggtttttatagaatgtttataggtttttaatttttattttttattacgggagattagagttgtaggattttaggggaggggtttttttttttattttaaggtattaagtttttttttttgtatttaataaatttttaataaatatttttattgttaattagaaattttgttttattttattttttttttttttatatataatttt

SEQ ID NO: 331 - DNA, 2501 bp, Artificial Sequence
  chemically treated genomic DNA (Homo sapiens)
ggaattatatgtgagaaaagaaaaaatgagataaaataagatttttgattgataatgagaatatttattgagggtttattgagtgtagggagaagggtttgatgttttggggtgggaggagagattttttttttgggattttgtagttttagtttttcgtggtggggggtgagggttgagaatttatgaatattttgtaggggttattgttttttttacggtgttttttttatgcgtgatttggtagttgtagtttttgtgggatttttattgtttaggcgttaggtttaggtagttgttggtcgcgtatttgttgttgttttgtttggagggtgtggtggtttttattttcgttttgacggggttgttatttgttttttaggttattgttacggttttcgggtagaagttatttatgagatatattagtgtggttttgttggtttgaagttttttagaggagggcgggaatagagtgatcgagggggtagttttgggttgatttgcggggtggatgaggggtagggggttagagttttggtgtttatttggggagtttttgattttagtatatgatgaggtgttggggtgtttttgtttaggggttttgtgtttgaaggtttatgttaggtagaggggttagggtgttttttattatgttttgatttgtacggggagttgttttattttagatatttgattatttgttttgagatttttcggggttttggtttttaatatcgatatttgatttttagcgttttgattttgtttttttttgttattttgatagataaagagagttttgtgttttttttgtatagcgaattttggggttatttttttggtttggttttttagttttgtgggatgttggggttttttggttttttaggttgttttagttaaatgtgtgttttggagttcgtgtatggggtaagggtttggggggatcggagagtttgtttgttgttttgggtttttttttatttcgtggagttttttttggtatttattttacgtttcggttatttggttatagtagtggggtttttacgtagtggattttgtttttttgatttttttgggtataggggatatgttttgaagagatttaggagttcgttttttcgttatatttattttttttgtgattttttttttggttttttggtgtttagagtttgtttttttttttttttttttgacggggttttttgagttttaggttggtttagggtttagtttttggtagtttttagacgtttagggtagtttttttattttttattttattttgggtttggattttggttttgggttttagttttgtgattttcgagtattagtttcgagggtattgggtttttttaaagttttttaggaggtgttttttttagattttttgtttttaattttttaggagatggaatttaggtaatttaagggtaaagttgtttcgataagaatttagattgaggaggttagaatagaataaggtttagagatttagtttgcgtttgttagatagatagagagataaatagagagagagagatagatagatagatagatagacgaggtttagtaggttattttatttagttttttgtttttgcggttagaggtgaagtggttgtagtgatttgttgaggtaagtaagggtttgaatagggagggtagaggtttttgtttaggtttgggatgtagggagaaaggttgattataagttgagataagatatagaaataaataaaaatagtagaaattgttttaagagcggggaaggagaggggagaagagatttatttaggacggttagtttggttttttcgtcgaatatttaatattgtgatataggtttatataaaaattttttttgggatgtttttagttttagtttttattgtagttgtgaaggaggaagttggggttagtggttttggtggtatttgtttatgagggagtttatatggtttttatatttaatttatagagagaggggatcggtgatattttgtgatttatagtaggatttttggaaatttaggtttttggaggatattgggattttgaatttgttttttgtattaattattatttaggtttaggattgaatttattagagggtattagtgtcgttaaggagtgaatttttatagatgggataggtggttttttttttgtaaagttgaattaatttatggtttaatttttggtaatattatggggtggtgtagagggtgtttttttttttttatgtagaggttgattgttttagagtgtagtgttttgggaattttggtgggttttagttttattttttggagtagttttagttggataggtttggttagtgaggtttggttggttttaatatgaagtgttagttatatttgttagggtaattttgggagtatttttgtatttttgaatttggttttatgttgggtgggatagttagggtggaggttgtcgttgttttttttaaatgggggata

SEQ ID NO: 332 - DNA, 2764 bp, Artificial Sequence
  chemically treated genomic DNA (Homo sapiens)
aattatatattttgttttagagtttttttttgttgttttggagtgtagtggtatgattatagtttattgtagtttttaatttttgggtttaagttatgatttttttgttttatttttttgagtagtgggtattataggtatgtgttattatgtttagcgaattaaaaaaattatttttgtgtgtgtggagatggagttttgttatgtttttaggttgttttttttttttttttttgagacggagtttcgttttgtcgtttaggtcggattgcggattgtagtggcgtaatttcggtttattgtaagtttcgttttttaggtttacgttatttttttgttttagtttttcgagtagttgggattataggcgttcgttatcgcgttcggttaattttttgtatttttagtagagacggggttttattttgttagttatgatggtttcgattttttgattttatgatttattcgtttcggttttttaaagtgttgggattataggtgtgagttattatatttggtttatattttgtttttttttttttttttttttttttttttttttttggagatagtttttttttgtcgtttaggttggcgtatagtggtgtaatttcggtttatttgtaatttttgtttttcgggtttaagggatttttttgttttagtttttcgagtagttgggattataggtttgtatcgttatatttggttaatttttgtatttttagtagagatagggttttattatgttggttaagttggtttcgaatttttgattttaggtgattcgtttattttggttttttaaagtgttgggattatgtttttttttttttttttttagatagggttttgttttgttatttaggttagaatgtaatggtaggattttggttcgttgtaatttttattttttaggtttaagtaatttttttgttttagtttttttagtagttgggattatagatattcgttattacgtttagttaatttttgtatttttagtagagacggggtttcgttatgttggttaggttcgtttcgattttttgattttaggtgatttgtttatttttttgttttttattgaggtttttgttagttaggtattagtatagggaaagggtttaagggtagtgtgtggttatggttttgtttgtagaagatggtagtaggagtaattttttttatatttatttaatatagtcgtttatgattagtttggttaggttttagggtagtgtgcggagatttattgtgattttagttttaggtgtttttttagttggagaggtagtttacggttgattatagtgtaaggttagatgtttttttttgtttttgtgacggtagaaacgaggtttgttttatgattttattttaagtatttgttatagtggtgtttttgaatatgttacgggttatttatttatttattaaatattaagcgtttttataatattttatggggattttattttttattttgtttttgagatagggttttattttgttatttaagtttgagtgtagtggtttgattatcgtttattgtagtttttaatttttgggtttaagtgatttttttgttttagttttttgagtagttgggattatagatatatattattatgtttggttaattttttttatttttttatttttgtagagacggagttttatcgtgttgtttaggatggttttgaatttttgggtttaagagatttatttatttcggttttttaaagtgttgggattataggtatgagttatggtattaggttaagttttatttttatcgggaatggggatgatgaaggttaggagcgtttcggtttggagaagtttaggttttttagttttttttttgatggagttataattgttagggtttattttttttatttatttataagtagggtttatagagtagagttttcgattagaagtttttttaaggttaggttgtagggaaggtaagtagaaagagtatttattgttttaatttgattttattgaaaaggaaatatataaaaattatgtataaaaaaaattaattaaatatgtatagaaaatttatttcggtatttatagtagcgtatatatagtattttataggttgggttatttttttttatttttagatttttttttttttcgagatttttttttttttttgatttttcgttttttttttagcgtttggttttggggattaaggttggggcggttttagttaaaattttttattttttaaatgaatgttagtggttatacgtgttttttttaaatttatgtaatgggattgatggggcggggggcggttacgggtagagtataggatttatagtttgggttttttttggttattttttgatgaaggtgaggtaggtatgtttattattcgtcggttggtttagggaagatggttgggcgtcgggttggagtaatcggtaaacgagttttattttttggttttaggaggttagtggttacgtttggtttatttgttttttacgggtttttttttaggaggagggggggaagtattaggggtttgaggttaggtttagagtgaaggagtatcgagaggagagttttttttttttagtgttatttttgtagttggaacgggtattagtataatagttttttttgagatggtggtgggcggtagaggcgggcggtttagtttttattttttcggttatcgttatttttcgatgttgagtttattagtcgttttttttttggttttttg

SEQ ID NO: 333 - DNA, 2764 bp, Artificial Sequence
  chemically treated genomic DNA (Homo sapiens)
taagaagttaggagagggacggttgatggatttagtatcggaaggtggcggtgatcgagggggtggggattgagtcgttcgtttttgtcgtttattattattttaggaaaggttgttgtgttggtgttcgttttagttgtaggggtgatattgggaggggggggtttttttttcggtgtttttttattttgggtttggttttaggtttttggtgtttttttttttttttttgggagggggttcgtgaagagtaaatgagttaaacgtgattattagttttttggagttagagagtggggttcgtttgtcggttgttttagttcggcgtttagttattttttttgagttagtcggcgggtggtgggtatgtttgttttatttttattagggggtggttaggaggggtttagattgtgaattttgtgttttgttcgtgatcgtttttcgttttattaattttattgtataggtttagagagagtacgtgtgattattggtatttatttggggggtgggagattttggttgaagtcgttttagttttagtttttagggttaagcgttggggggaagacggggagttagggagggggggaaatttcggaagagggaggagtttgggagtggggagggatggtttagtttgtaagatattgtatatgcgttgttgtagatatcggaatgaattttttgtatatgtttggttaattttttttgtatatgatttttgtatgttttttttttaataaaattagattggaatagtggatattttttttgtttgttttttttgtagtttggttttggagaggtttttgatcgggggttttgttttgtgagttttgtttgtgagtgggtgggagaggtgggttttggtagttgtggttttattagaagaaaggttaaggggtttgggtttttttagatcgggacgtttttagtttttattatttttattttcggtaaaagtgaagtttggtttggtgttatggtttatgtttgtaattttagtattttgagaggtcgaggtgggtagattttttgaatttaggagtttaagattattttgggtaatacgatgaaatttcgtttttataaaaataaaaaaataaaaaaaattagttaggtatggtggtgtgtgtttgtagttttagttatttaggaggttgaggtaggaggattatttgagtttaggaattggaggttgtagtgagcgatgattaagttattgtatttaagtttgggtgatagggtgagattttgttttaaaaataaaataaaaagtgaagtttttatgaggtgttgtaggggcgtttgatatttaatggatgagtgaatgattcgtaatatatttagaggtattattgtgataagtgtttgggatagagttatgagatagatttcgtttttgtcgttatagagatagaaagggatatttggttttgtattgtgattagtcgtaggttgtttttttagttggaggagtatttggagttaagattatagtgagttttcgtatattgttttgaggtttaattaggttggttataagcggttgtgttgagtaaatgtagaaagggttgtttttattgttattttttgtaaatagggttatggttatatattgtttttgagttttttttttgtgttgatatttgattggtagagattttaatgagaagtagggaggtaggtagattatttgaggttaggagatcgagacgagtttgattaatatggcgaaatttcgtttttattaaaaatataaaaattagttgagcgtggtagcgagtgtttgtaattttagttattgaagaggttgaagtaggagaattgtttgaatttaggagataaaggttatagcgagttaagattttgttattgtattttagtttaggtgatagagtaagattttgtttggaaggaaggaaggaagggtataattttaatattttgggaggttaaggtgggcgaattatttgagattaggagttcgagattagtttggttaatatggtgaaattttgtttttattaaaaatataaaaattagttaggtgtggcgatgtaagtttgtagttttaattattcgagaggttgagataggagaattttttgaattcgggaggtagaggttgtaagtgagtcgagattgtattattgtacgttagtttgggcgatagagggagattgtttttagaaaaaaaaaaaaaaggaaagaaagagaaagaagtaaggtataggttaggtgtggtggtttatatttgtaattttagtattttgggaggtcgaggcgggtggattatgaggttaggagatcgagattattatggttaataaggtgaaatttcgtttttattaaaaatataaaaaattagtcgggcgcggtggcgggcgtttgtagttttagttattcgggaggttgaggtaggagaatggcgtgaatttgggaagcggagtttgtagtgagtcgagattgcgttattgtagttcgtagttcggtttgggcgatagagcgagatttcgttttaaaaaaaaaaaaaaagaatagtttagaaatatagtaagattttatttttatatatataaaaataatttttttaattcgttgggtatggtggtatatgtttatagtatttattatttaggaggatgaggtagggggattatagtttgagtttaggagttggaagttatagtgaattatgattatgttattgtattttagggtaatagagggggattttgaagtagggtatataatt

SEQ ID NO: 334 - DNA, 3001 bp, Artificial Sequence
  chemically treated genomic DNA (Homo sapiens)
agatttgtatttggtttttagtttaatttttatttattattgttttttttatattatttgattgcgtttttttaaatataatatttttatgttttatgtaatttcgtaaagtattgagttaaggattggagatgttaataatggttttggtttttaaggggttttttatttgttttttcggtttttttttatttaattatttaaaatataggtagagaatttttgaaaatatagtagatttaattatttttttgtttgaatttttcggtggtttttaatgtttagagtgtaaagtttaggagtataaggtttttttttatttttttataaattatttcgtgattttaggttttagtttagagttcggatagtttttgttttagtttttgtttaggatttttttttggcggtaattttttttgtggttttgtagtattattttttagtttgggttagaggtttttttttagttttttagtttttaagttttttttcgtaattgtatttattatttttaaattattgtttggttgtttgtttttttttatattggtttttgagtagaaataaggattaatttatgttttttagtttttatttttaatgaaatattttaatagatattgaaaaatgtttttgaattaatgagataagtttattgataataaataggtaaataatagtaatgtgttaatagtggttgtttttggtgagtagaattttgaggtttgttttttttattttttggtatttcggttgtttttgtaatgattgtattttgtttttgtaattataaaggatagtaaaggaaattttattttgaaaataatataaagggattcggggattttaaaagaaggtgatttttttcgtttattttagagaattaggaaaggagtgtttaaagatttatagaatttttataagtgacgttgggggggggttagttagttagggcgtatgtcggttagcgagtggggtgggttttgggttcgggagaagttagattagtgttttgtatagggttttgagggtaagacgaggaatttcgatttaggtttttgaatttggagagttatagaaagtttgtgagtttaggagaagcgtttcgagttcggtatttggagtagtttaaggtagtagcgagtaagtttaaagacgtaggagggagggtggggtggaggagtagagagaaaatagaagtcgtttatagattttttttttttttggggtaattaaattttaagtgtaggaagcgtttggggattgtttagtttttagttgtgttattattcggtgataggtatttgttaattatttttaaaagttttttatttgttattttatttagattgcgcgtttttaattttttttattttatatgttgtgtttaatgaaaagtatggttagcgagcgaaggtttgtaaggagatagacgagggcgaaattaagttaggcggtttttttttaaattttcgtaaagtagaagggttttttattttggtagtaggttttggttaaggggtttttagttttgacgattcggggaagagttttttaaagtagaacgttcggttcggcgtttagattaaacgcgggggaatcggaagggcgaggtttttacgtaagttcgcggtaaaagtggtagggagtggttgtttgtaaagattttaagacggtttgaagaaggagtgggtggcgggtgggggttagggcgattaggcggggaaatagggagagggtcgggtttcgcggggtagttggggtcggggttcgtcgatttgggcgggggcggggggcggggggggtgcggttcgggcggggtcggtggggcgggaggcgtggtcggcggggggagtgggggcggtttttttcggtatatgcgtatcgtagcgggtcgcgcgttttaaggagtggtattttttaaaagtgtagtcggagattagtttatagtcgtttgtatttgtatttagcgttaggtttcgttagttttagttgcgcgcgttttttagtttcgtattcgttcggtttaggttaagttagtttttattatgtcggttaaaggaggtattaagtgtattaaatatttgttgttcggatttaattttattttttgggtgagtgagcgcgattgtcgcgcgttttttttagggtttatttgttcgcgggtttcggatattggtcgcggtcgcgagtgtcggtagttggtattgttcgtatcgggtaggtatcgggcgggaagagagagcgttttgcggttgttagttggttttaaggtcgggtttagagtcgggcgggacggtcgcgacgggcgtattcgggtgggggtttattatcgtttagtcggcgtggggagtcgggtttttttgagatgaggcgtgcgggagggttttgagtattttagttcgtttaggatttgagttggggtgtgtgtttgtttttagtttaagttttttcgagtgttagagaggaaggtagggagaagcggagtatttttttttgggttaaggttaaggaggattgtggtgagtagtatggtttgtgatcgggtggggttttttaggtagtagggggcgttaggaagggagggtgcgggtacggcgagagtttagttaagagcggtttttatttttacgtaggagcggtaggggtgtttcggtcgcgggttcggtttcgggatttagtttttgagagtcgggggtttttttatttttgaggaggaatttcgtaggttttcgtttttttagattttgattttgagttatcgtgagagcgtcgaattttttggtagttttttgaaagattagtttgttttgattttttttaaggacgataagtatttttattggagagaatttagagttcgggagaggagggggtagatatttatttgcgtttttagtgggatgagttttgtgtgtgtattttcgggagagattaggtgttagttagttgttcgtttaggagagttttggttttgttttttttttttttcgttagt

SEQ ID NO: 335 - DNA, 3001 bp, Artificial Sequence
  chemically treated genomic DNA (Homo sapiens)
gttggcggggaggggagagggtaaggttaaggtttttttgggcgggtagttggttggtatttgatttttttcggaaatgtatatataggatttattttattagaggcgtagataggtatttgtttttttttttttcgaattttgagttttttttagtgaagatatttatcgtttttgaaagaaattaagataagttagttttttagggagttattagggagttcggcgtttttacggtggtttagaattaaagtttgagggaacgggggtttgcgaggtttttttttaagggtggaggggttttcgatttttagggattgggtttcggggtcggattcgcggtcgaggtatttttgtcgtttttgcgtaaaagtgagagtcgtttttggttgagttttcgtcgtgttcgtattttttttttttggcgttttttattatttgggagattttattcggttataagttatattgtttattatagttttttttggttttggtttaaagaggggtgtttcgtttttttttgtttttttttttggtattcggagggatttgagttgggagtagatatatattttagtttaaattttaggcgagttaaagtgtttaggattttttcgtacgttttattttaagagggttcggttttttacgtcggttgggcggtgatgagtttttattcgaatgcgttcgtcgcggtcgtttcgttcggttttggattcggttttggagttagttggtagtcgtagggcgtttttttttttcgttcggtgtttgttcggtgcgggtagtgttagttgtcggtattcgcggtcgcggttagtgttcggggttcgcgaataggtgggttttgagaggagcgcgcggtagtcgcgtttatttatttagaagatgaagttaaattcgaatagtaggtatttgatgtatttggtgttttttttgatcggtatggtgagggttaatttagtttgggtcgaacgggtgcgggattggggggcgcgcgtagttgggattggcgggatttggcgttggatatagatgtaggcggttgtaggttggttttcggttgtatttttaaaaagtgttattttttagggcgcgcgattcgttgcggtgcgtatgtgtcgggaaaagtcgtttttatttttttcgtcggttacgtttttcgttttatcggtttcgttcgggtcgtatttttttcgtttttcgttttcgtttaggtcggcgagtttcggttttagttgtttcgcggagttcgattttttttttgttttttcgtttagtcgttttaatttttattcgttatttattttttttttaagtcgttttggggtttttgtaggtagttattttttgttatttttatcgcggatttacgtggaggtttcgttttttcggttttttcgcgtttggtttgggcgtcggatcgggcgttttgttttgggagattttttttcgggtcgttagggttaaaggttttttggttaaggtttgttgttagagtgaggggtttttttgttttgcgaggatttaaagggaagtcgtttggtttaatttcgttttcgtttgtttttttgtaaattttcgttcgttgattatattttttattgggtatagtatgtggggtaggaggaattagaagcgcgtagtttgggtgggatgatagatgggaggtttttggaagtaattagtaaatatttattatcgaataataatatagttgagggttgggtagtttttaagcgttttttgtatttgaggtttagttgttttagagggaaaaagggtttgtagacggtttttgttttttttttatttttttattttatttttttttttgcgtttttggatttgttcgttgttgttttgaattgttttagatgtcgagttcggagcgttttttttgagtttataaattttttgtagttttttagatttaaggatttaagtcgaaatttttcgttttgtttttaaggttttgtatagagtattgatttgatttttttcggatttagagtttattttattcgttggtcggtatgcgttttggttggttggtttttttttaacgttatttgtaggaattttgtgggtttttaaatattttttttttgattttttggagtggacgaggagagttatttttttttgaagttttcgaatttttttgtattatttttaaaatgaagttttttttattgttttttatgattataaaagtaagatatagttattatagaaataatcgaaatattaagaagtgaaaggaatagattttaaaattttgtttattagaaatagttattgttagtatattgttgttatttgtttgtttattattagtagatttgttttattggtttaaaaatattttttagtatttattagggtattttattaggggtaggagttgaaaaatatggattagtttttgtttttgtttagggattagtgtgggaggagataggtagttagataatggtttgagggtgataggtgtagttacggggagaggtttgggggttaagaggttaaggagaggtttttgatttagattgggagatgatgttgtagaattatagggaaagttgtcgttaagggagaattttgggtaaaggttggggtaggggttgttcgggttttgggttggagtttggagttacggggtagtttgtgggaaggtgagaaagagttttgtgtttttggattttgtattttgagtattaggggttatcgaaaggtttaagtaggggaatggttggatttgttgtgtttttagaggttttttgtttgtgttttaggtagttgggtgggggaaggtcggaggggtaggtaggaagttttttgaggattaggattattgttggtatttttagtttttggtttagtgttttacgggattgtatggaatatggagatgttgtatttggggagacgtaattaggtaatatgaggggagtagtggtagatgaaagttgagttgaggattaggtgtaaattt

SEQ ID NO: 336 - DNA, 3001 bp, Artificial Sequence
  chemically treated genomic DNA (Homo sapiens)
gtatagataatatagtttgaagaagtaagattggtgttggatagattagggtggtatagttattaatttattgtatattttaaaatagttagaagataattttgatggtgtttaaattttgtaattttaatatattgggaggattagttgaagttaggagtttaagaatagtttgggtaatagtgagattttatcgttataaaaaaatttaaaaattagttaggtgtgggtagtgtatatttgtaattatagttatttaggaggttgagacgggagaagcgtttgaattagggaggtggaggttgtagtgagttgagatggcgttattgtattttagtttgggtgatagagcgagatttcgttttaaaaaaaaaaaaaggtcgcgcgtggtggtgggcgttttgtaattttagttattatttcggaagttaaagtacgagaatcgttttaatttgggagatggaggttgtagtgagttgggattatattagtgtatttttgtttgggttgtagagtgagatttttaaaataaaatattattttggtagtattgtagagaatgaattggtagggttaagattatttggagatttgtaataatattttaggtaaaatacgaggaaggtttaaattagggtaatgaatgaaggttggagagaatatgggtttgaggaagtttaaggagatagtatttgtatatttggttgttatttgagtgaagtgaaaggagaagtggtatcgaaaatgttatttggtgtgtttcgtttggagataattaattcgaagtgatgtttgttgtaataggtgtgtatagtgttgtagaggatgtttatagtttagtttagggttggttggaagtaatatgtgggttttgaagttagtcggtttgggggttattgttttaaatagagaagataggaaggaataggagttgagtatttagaggtatttttttttgtggtttaatattatatttatgggttatttttaaaagatgtgtttttattttttcggggattttcggaaatttcgttacgatttcgcggaacgtttcgtggggaagtttttttaggttattagagggcgttaggcgggtcgtagcgattttagagtcgcgttatggtcgaggtgcgggtgtagttgtttttgtttcggcgttcggagtcggtgagtttcgtacggagtgtgtgtggttttttgggagtcggattagggttcgggacgtggtttatttattgtagtttgaagcgaggacggtttgttttttcgagtaggttttttttaggcgttttcgttaggttttcgttttaggtcggtagaagggggttttagagcgggggtagtgaagggttaaagatggggattgaaatcgggtgggaattggcggcgaggatttcgtttttaacgcgcggtgtagttttatttttggaagttacgtttatttagtgtcgtttttttgaagttttaatttagttggtttttttttgttagcgattttttttttgtttttttgcggttttggaggagcggtttagggtttttggggttgagttgtttatagatcgaggtgtggatttgggtgtggtcgttattttgtagtttagcgataagattgttttgttaattcgaagggtacgtattttgagcgttttttttaatttttgggtattttcgggtgagtattttggggataaggttttaagtatagagaagaaatttgtttttttttcgtaataatgttttttttagttttagaaggataaagtgggttttaaaatgtggtatgtttatagttataagggattgtaattttttttgtgtttattggaggggagaggagtgttaatagtgagtgggggttttttggttaagattattattatttatttattggttttattgttgttgtaggtgggtacgtggaatttgaggaggaggtaattagttagttgatttaatttgagttaagagatttatgtttgggattattttgggtgtgggttgagggaggggtaagtaaaaggatttggaagagttaggtattggtttttttgatgtgttttttttgatttttagttgttggacggagggtttcgagaattttgggaggagagtggattatatttgttttagggttagtttttttgggtttttttgggtttatgggaggtgagataagtagttgggagaagtttttttatagattagtttttatttgttttggttataagggaaataatagtatataagtgggttggaatttttaaatttataatttttatttatgtttttgttgtgttatttgtattatttacgtttttagtttttggttattattttgttttattttaaagttgtattaataaagttttaaaaagtgatataaagggtcgggtgcggtggtttacgtttgtaattttaatattttgggaggttgaggtgggcggattatttgaggttagaagtttgagattagtttggataatatggcgaaatttcgtttttattaaaaatataaaaattttagttgggcgtggcggtaggcgtttgtaattttagttattttggaggttgaggttggagaattgtttgaatttaggaggtagaggttgtagtgagttaagattacgttattgtatgttagtttgggcgataagagcgaaattttattttaaaaaaaaaaaaaaagtgacggaaagtttttatttttgttgttttttttttttagtttgtttatttttttaggttgagttggggtttatttaaatattattatattgttttgtatttattcgtgattttttaggaattatagtagtagttgtaggtagggttggtagtgagggaaggaaatagggtttaggggagtttaagtaatttggttttgattgtgattaggagttgggcgggggtggcgggggtagttagagataacgaagaatatgtaatgttttttttttttgtttttgtttttttttatgaaatttgcgggtaggttttg

SEQ ID NO: 337 - DNA, 3001 bp, Artificial Sequence
  chemically treated genomic DNA (Homo sapiens)
taaaatttattcgtaggttttatggagaaaggtaggagtaaggggaaagggtattgtatatttttcgttatttttgattattttcgttattttcgtttagtttttaattatagttagaattaggttgtttgggtttttttgagttttgttttttttttttattgttagttttatttgtaattgttgttgtgatttttgggagattacgagtagatatagaataatgtgatggtatttgggtaaattttagtttagtttaggagggtaggtagattaggaaaagaaaatagtaaaagtgagaatttttcgttattttttttttttttttaagatggagtttcgtttttgtcgtttaggttggtatgtaatggcgtgattttggtttattgtaatttttgttttttgggtttaagtaattttttagttttagtttttagagtagttgggattataggcgtttgtcgttacgtttagttaaaatttttgtatttttagtagagacggggtttcgttatgttgtttaggttggttttaaatttttgattttaggtgattcgtttattttagttttttaaagtgttgggattataggcgtgagttatcgtattcggttttttgtgttattttttgagattttgttaatatagttttagggtgaaataaaatggtggttaaaagttgagggcgtggatggtatagatgatatagtagggatatgggtgagggttatggatttggggattttagtttatttatgtgttattgttttttttgtagttaaggtaggtaggggttgatttatggaggagttttttttagttatttgttttattttttataaatttagagggatttaagagaattggttttggggtaggtgtagtttattttttttttaaagttttcgaagtttttcgtttagtagttgggagttagagaagatatattagaggggttagtgtttgatttttttaagtttttttgtttgttttttttttagtttatatttaagatggttttaggtatgggttttttggtttaggttggattagttgattggttattttttttttaagttttacgtgtttatttgtaataatagtggggttagtaggtgaatggtggtggttttggttagggagtttttatttattgttgatattttttttttttttagtggatatagagggagttgtagttttttgtgattatgaatatgttatattttggggtttattttatttttttgagattgggaaaaatattgttgcggggaaagggtaaattttttttttgtatttggggttttgtttttagaatatttattcgggggtatttagaggttgggggaaacgtttagggtgcgtgtttttcgggttagtaagatagttttgtcgttggattgtagaatgacggttatatttaggtttatatttcgatttgtgggtagtttagttttagggattttgggtcgtttttttagggtcgtaaaagggtagaaagggggtcgttggtagaaggaagttagttgggttaaggttttagaagggcggtattgggtgggcgtgatttttaaaaatggggttatatcgcgcgttgggggcggggttttcgtcgttagtttttattcgattttagtttttatttttggttttttattgttttcgttttggggtttttttttgtcgatttggagcggaagtttagcggaggcgtttgggaagggtttgttcgagaggataagtcgttttcgttttaagttgtagtgaatgggttacgtttcgagttttggttcggtttttaggaggttatatatatttcgtgcgaagtttatcgatttcggacgtcgggataggagtagttgtattcgtatttcggttataacgcgattttggagtcgttgcggttcgtttggcgttttttggtggtttagagaagtttttttacggaacgtttcgcggggtcgtagcggggttttcgaaagttttcggggaaataagggtatattttttgaggatgatttatgggtataatattaaattataaagaagaatatttttaaatgtttagtttttatttttttttattttttttgtttaggataatgatttttagatcgattgattttaggatttatatgttatttttaattagttttaagttgaattgtaagtattttttatagtattatgtatatttgttatagtaggtattatttcgaattaattatttttaagcgaaatatattaaataatattttcgatattatttttttttttattttatttaaatggtaattaagtatgtagatgttatttttttaaatttttttaaatttatgttttttttagtttttatttattgttttagtttaagtttttttcgtattttgtttgaaatattattgtaagtttttaaatagttttgattttattagtttattttttatagtgttgttagagtgatgttttgttttgagagttttattttatagtttagataggagtgtattggtgtgattttagtttattgtaatttttattttttaggttgaagcgattttcgtgttttagttttcgaagtagtagttgggattatagggcgtttattattacgcgcggtttttttttttttttgagacggagtttcgttttgttatttaggttggagtgtagtggcgttattttagtttattgtaatttttatttttttggtttaagcgtttttttcgttttagttttttgagtagttgtgattatagatgtgtattatttatatttggttaatttttaaatttttttgtaacgatgaaattttattgttgtttaggttgtttttgaatttttggttttaattgatttttttagtgtgttgggattataggatttaggtattattaaaattattttttagttgttttgaaatgtatagtaaattaataattatgttattttgatttatttaatattagttttatttttttaaattgtattatttgtgt

SEQ ID NO: 338 - DNA, 2457 bp, Artificial Sequence
  chemically treated genomic DNA (Homo sapiens)
tttatatatagaatttttttttttttaggtagttttgtttttttatttagtttggagtgtagtgttgcgattttggttgattgtaatttttgttttttggttttaagcgatttttttattttagttttttgagtggttgtgattattagtgtatattattatgtttggttatttttttttattttttatggagagacgggtttgttatgttgtttaggttagttttgaattaagtaatttgttggtttcggttttttaaagtgttgggattataggtgtgagttattatgtttggtttgtttttgaagaaatttaagagtttaagtaagtttgtattgttgagtattaggattgggttttggttttaacgatcggattttgaaggtagttagttgatttgtttttagttattatatgaaaggtattttattttttttttttttttttaaatggagtttcgtttttgttgtttaggttggagtgtaatggtacgatttcggttcgttgtattttttgtttttcgggtttaagtgattttgtcgttttagttttttgagtagttgggattataggtatatgcgttattatatttagttaattttgtatttttattagagatggggttttattatgttggttaggttggttatgaatttttgattttaggtgattcgtttattttagttttttaaagtgttgggattataagcgtgagttattatatttggtttatattaaaggtattttataatttattttgttttgttgtttgggattttttgaattttgttttttttttatttatttattttgatttttttagagttagtttttgtaagttgggaatatagtatttaaatgttaaattggtatagaatgattttatttattggtataggtgaaatttttataaataagtaaagttttgtaaaattttgtaagatttttaaggaaaagatgttatgaaggatgaggaggttattaagtttttgggagttgtattaatattattaggatttttttttgaagaggtttatttatttatttatttatttatttatttattttttgagatagagtttcgttttgttgtttaggttggagtgtagtggcgcgatttttttttatcgtaagtttcgtttttcgggtttacgttatttttttgttttagttttttaagtagttgggattataggcgtttattattacgtttggttaattttttgtaattttagtagagatagggtttttttatgttaggtaggatggtttcgattttttgatttcgtgatttattcgttttagttttttaaagtgttgggattataggtatgagttatcgcgtttggtcgaggtttattttttgatgaaataaatttttgagtaaatataattttggaagagattaaaatttttttaaagtggattaggagataataattaattaattttttagtgtttaggatggtgtttagtatatattaaatgtttataatgtatcgtttttttgaattttaatttttagagatattattatttaattttatagatgaggaaataagtgattatatataatttttgggttatttagtttattagtggtagagttgaaaatagggagttttagtttagaaaatgtttttaatttttataataagggtaagagaatttcgatatgtgatggtgtgtttttgtttaatatttataagatggtgtagtaaatagtggttagggttttagtttttttatttattagttgtgatattggttagttaggtttaagaatttgttttagaaagatagtaattgtttaaattatagtttatattatttatggtagtttagaattaaagtaggtagtaattaaggtggaaaagtttttagttattttaaaaagcgttaggtttattttagttggattaatttttattatagtatatagataaatatttggagagaaaataagatttacggttttagaagaaattaaataaggatgttgtattgtattttttaattgtatgggtagttttaaataaatggagaaagtattttttagaagttatattagtaggaaaaaattttattaagtatttatatagtaaatttttataattttataaaagatttttgattttatttgaagtatatatgagggaaagagtttttttagtaggtgttttcgttgtttatagaagtaaattaaaggatttaaaattggaggtaagttaggatgttaaaaagggggaagagaaatgataaagaattatttataaattttatgtttattttaagatatttgtttaatgatttttatataataagtattttagggaaaattattatttttttaagataaaagtataattttaaaagttgtagtttttaattatagtaatattttttatttttagtaatatgttttaatattttggattgttggatgttaaaagataa

SEQ ID NO: 339 - DNA, 2457 bp, Artificial Sequence
  chemically treated genomic DNA (Homo sapiens)
ttgttttttgatatttagtagtttaaggtattgagatatattattggaagtaagaaatattattataattgagaattatagtttttaagattgtatttttattttaaaagggtggtagttttttttaaaatatttattatgtaagggttattagataaatgttttgaagtagatatggaatttatgaatggttttttattattttttttttttttttttggtattttggtttgtttttagttttaggttttttagtttgtttttgtaagtaacgggaatatttgttgagggggtttttttttttatgtatattttaagtaagattaagaattttttgtgaaattatagaaatttattatgtaaatgtttgatggaatttttttttgttagtgtagtttttgaaaggtgttttttttatttatttaaaattatttatgtaattaaaaggtataatgtagtatttttgtttgattttttttagggtcgtaagttttgttttttttttagatgtttatttgtgtgttgtggtaggaattaatttaattgaagtgagtttaacgttttttaaagtgattgaaggtttttttattttaattattgtttgttttaattttggattgttataagtgatataagttataatttgagtagttattgtttttttgagatagatttttgagtttaattgattaatattatagttagtaagtggaagagttagaattttaattattatttgttatattattttataaatgttaaataaggatatattattatatatcgagatttttttgtttttattatgggaattaagagtattttttagattgaaattttttatttttaattttgttattggtaagttgggtaatttaggggttatatataattatttatttttttatttgtaaagttggataatggtatttttaaaggttaagatttaaagagacgatgtattataagtatttagtatatgttaggtattattttaaatattggaaagttagttagttattattttttaatttattttggaagggttttaattttttttagaattatatttatttaagaatttgttttattaaagaataaatttcggttaggcgcggtggtttatgtttgtaattttagtattttgggaggttgaggcgggtggattacgaggttaggagatcgagattattttgtttaatatggggaaattttgtttttattaaaattataaaaaattagttaggcgtggtggtgggcgtttgtaattttagttatttgggaggttgaggtaggagaatggcgtgaattcgggaggcggagtttgcggtgaggggagatcgcgttattgtattttagtttgggtaatagagcgagattttgttttaaaaaataaataaataaataaataaataaataaataaatttttttaagaaaaaattttagtgatattaatataatttttaaagatttgataatttttttattttttatagtattttttttttggaaattttataaggttttataggattttatttatttataaaaattttatttatgttagtagatgaaattattttatgttaatttagtatttaaatgttatgtttttaatttataaagattaattttggggaggttaaagtgaatgagtagaaaaaaggtaggatttagagaattttaagtagtaaggtaaagtggattatagaatatttttggtgtaggttaggtgtagtggtttacgtttgtaattttaatattttgggaggttgaggtgggcggattatttgaggttaggagtttatggttagtttgattaatatagtgaaattttatttttagtaaaaatataaaattagttgggtgtggtggcgtatatgtttgtaattttagttatttaggaggttgaggcggtagaattatttgaattcgggaggtagaggatgtagcgagtcgagatcgtgttattgtattttagtttgggtaataagagcgaaattttatttaaaaaagaaaaaaaaaaatagaatgttttttatgtagtgattggaggtaagttagttagttgtttttaagattcggtcgttgaagttagggtttaattttggtgtttagtaatataaatttgtttaggtttttaagtttttttagaaataggttaggtatggtggtttatatttataattttagtattttgggaggtcgaggttagtagattgtttggtttaagattagtttggataatatggtaaattcgtttttttatgaaaagtaaaaaaaaatagttaggtatggtggtgtgtattggtggttatagttatttaggaagttgaggtgggaggatcgtttgaggttagggggtagaggttgtagttagttaagatcgtagtattgtattttagattgggtgaaaaagtaagattgtttaaaaaaaaaaaggttttgtatataag

SEQ ID NO: 340 - DNA, 4001 bp, Artificial Sequence
  chemically treated genomic DNA (Homo sapiens)
ttaggtaaattttgtatgtttatagtattgttagatttttgttgataaaataatttataattttgattttatttttttttttttttttttttttgattttgtttgaatttatgaggtttagttgtatttttaagttagtttttttgttaattagtgatttttttgttgaatatttaaaaagggattgttaggattgaataagagaattttttttagttatttttttttttttgagaaaggattttattttgttgtttaggttggtgtgtagtggtgtaattatagataattgtagttttaattttttaggtttaagttttttttgttttaatttttgagtagttgggattatagatgtgtattattatgtttagtaaatttttaattttttgtagagatggggttttattatattatttaagttagttttgaatttttgggtttaagtaatgtttttgttttggttttttaaagtgttgggattataggtgtgagtgattgtatttagttttttatagttatttttaatttattattggtttttttattagattgtattgttatataaggaagtgattttagatagtatggtattagattagaggttgtgtttttttttaataaaggtataaatgagatgaattgttttaaggttttaggtttgttttttttttgagaagtgatttttgggaggttatatttagttaaagtagttttgttagtataaatttattaggattttgatatgtaattttgtattatttttagtaaggttaaaatggtatatgaaaggaggtggtttataaaatggattaatattaatatggaattttatgttttttaggtatttgttgtatttttggagatttaaaatgttattatggtattttaggttagattggtagtggagaaattattgtgagttattggatttgtttaagataaaattttgaatttgtaaataaattttggttagttttttttaatatttttgtggtaaataatatataatttagatttatgtaatgggtgtaagaaaattattgttttggttattttagtatgaaatttaagagaaaatttattgaagtgtttttaaaattattttgattataatttaaggtaaaatataagttaaaaaatatattatgatatagtaaatgaagttaggattgtatatatatgtttatttaagtatatgaaatggaaataatagttttagaggtagtattatgtttattatatttgaggtatttttggtattttttattttatttaattaaatttttagtattttttattttagttatatttattttataatttattaatgggttttgatttatagtttaaaaatattgttttagagaatttaaatgtttatattatttatatttataagaagtaattgttttggggtttttgtgtatttttatagtttagttttatttatttgttaagatttggttaagtgagaattgtaaagagttatgtttttaattatttaagttaggaattttttgaggtggtaggggaattagggtgagtagaaggatatattatttttatttttattaagtttatgttatagtggatgaaataaatttagaagttaaggagttttagaagagaagttatttttttgagtaattatgttaagtatgtaaatagttttagtagtgtttttttagtataaggtgtttttttttgatttaggagagttagtttaattttttttttttgagaaaatggaggtttaaagagtttgttatttatttttagtttttttattattttgagtttaagtataggattatttgtaatatatatgttgttttatatgattaagtgggttttgtgatagaaagggaatttggagttgagaagagaaagtgatgattaagttatattattaaaatgtttgatttttagatattttggaaagattttgaaggtattttagttaaatttttttttttagaaggagtttatttaattattttagataatagagaaaaattagtttttttaaagagataaattatatattatttagtgttttataatattttttgaataaatttaaaattttttatttggaatttaatttatttaaatttttattttaaaaattaggaaatagagttaaatatttttttagttattaaggtagtaaattaaagattgttatttgtataggagaatttatgatttgttttttttattattatatattttatgagtattgatttaaaaaattatgttatttataaattaattaataattgttttttttagggattgaaattttaaaattttagatgtggaggattgattttattttaaagtaaaatttagtggatttttgtatatatatttattttaatttgttataagtttgtattttggagattagtttatgttatatatttagaggtgtaatatttttttatttgggaaaattgaaattatttagatataaaagagtggttgtagtaagaaaataggtaaggagaatattttaaagtgttgatttttggtaaagttatatataggatgtatttgggagtagatttttttgaagttattttgtgtttagagatgtttttttttattttgttgtttatgttaaattttttgtgatatgtttttagagttttatgatttttttttttaatttgtagtgggagtttgaattttttatttatttttgtgattatttagtttataagagtttttgtttttatagggtttttatttgattatagattttataaaggtagagattttatgtttattttattattattgtatttttagtattaagtattaggattaatatatagtaagtgtttaatagatgtttattggatgattagattggtattttaaggtagtttgagattatgttttagataagatattttagtttagtttaatttttattatttattagttattaaagagaaattgataattatttatgatattttttttttttgttttatagttaattttgattattttgaaattttgtgagttattgggaaaggtagttttgggaaggtgagaataaattgaaatgattaattattagtagggttatgtagtttagggaatagagggtttagaaatgtttatattattgagttgttgggattgtaaggaaagataattaagtgaaaatgtttttgtaatggatttttataaaattgttattatagtttaagaaaagtgtgtgataggtagttatataatgaatatatattgttgttagaataattttattaaatttaaatttgtttatttttagtaaattttaaggtttttttttttattttaaaggagatgaagattttagaattatttttagattttattagttgtatgtttagtaatagttattttgtttatggaagagttatttatttttatgtgggaaagaagttatttgatttttatttgtttttttatttgtttaatgtttttattttaagaaaaatatatatttagtttaattttttttgtaagaaatttttgtatttaaattttgattattagttttttaatggagatatattttaagagaataatattttatataaaatttgtattttaaaattattttttgtttatttttttaggtattatatagatttttaaagaaattttaaaaatatggatattatatttagtgtttttttagtttttaaagttttttttggttatattatgtatggttgtaaatagaaattttttgtatagtattatttagtttgatagtttagttatgtttattttagttatttaaagtaggattaaggatgttatttgttattggaatatttttgatatggaggtagttatttttattaaaatgttgttttaaaagtttaaaaagtaatattaggtaaaattgtttgagaaaaaagagatttaagaattgaattggtgtatagaaaagaaaatgaaatttttaatttaaaattagagttaagtgg

SEQ ID NO: 341 - DNA, 4001 bp, Artificial Sequence
  chemically treated genomic DNA (Homo sapiens)
ttatttagttttgattttagattaaaaattttatttttttttttatgtattagtttaatttttggatttttttttttttaaataattttgtttggtattgttttttgggtttttaagatagtattttggtgaaaatagttgtttttatgttaggaatattttaataataagtaatatttttaattttgttttgagtgattgaaatagatatgattgaattgttaagttgaataatattgtgtaaagaatttttgtttataattatatatgatataattaaaaaggattttaaggattggaaaaatattaaatatgatgtttatgtttttgaaatttttttagaggtttgtataatgtttgaaaaagtaaatagaaaatgattttaaaatgtaagttttatatgaaatattatttttttaaagtatgtttttattgagaaattagtaattagggtttgaatatagaagttttttgtaaaaaaaattaaattgaatatgtattttttttaagataaaaatattagataaatgaggaaataaatagaaattgggtgattttttttttatatgaaaataagtaatttttttataaataagataattattattgggtatatagttggtagaatttgaaaatgattttgaaatttttattttttttagggtagagagaaaagttttaaagtttattgagagtaaatagatttgagtttaatgagattattttgataatagtatatgtttattatgtagttgtttgttatatgttttttttaaattgtggtgataattttataaaaatttattataaaaatatttttatttaattatttttttttgtggttttagtaatttaataatgtgaatatttttggattttttgttttttgggttatataattttgttggtggttaattattttaatttgtttttatttttttaaaattgttttttttaatggtttgtaaaattttaaagtggttaaagttgattgtaaaataaaaaagaagaatattatgagtaattattaatttttttttagtagttaataaataataaagattggattaaattgaagtattttgtttaaaatatgattttagattattttaaaatgttaatttaattatttagtaaatatttgttgaatatttattatgtattaattttagtgtttagtgttgggaatatagtaataatagagtaaatatagaatttttgtttttatggagtttgtagttaagtgagggttttgtaaagatggagatttttatagattaaatggttataaaaataaatggaaaatttaagtttttattgtaagttaagaagagaggttatggggttttaagaatatattatagagaatttgatataggtagtaaggtaaggagaaatatttttgagtatagaatgattttagaaagatttgtttttaggtgtattttatgtatggttttattgaggattagtattttaaaatgttttttttgtttatttttttattataattatttttttgtatttaagtaattttaatttttttaagtaggaaaatattatatttttaagtgtgtagtatgaattaatttttaaagtgtagatttgtaatagattagaatggatatgtgtgtagaagtttattgaattttgttttgaagtagagttgattttttatgtttgaaattttaaaattttagtttttagaagaagtaattgttgattagtttataggtagtatggttttttgagttaatgtttgtgaaatgtataatgatgagaagaataaattatagatttttttgtgtaggtgataatttttggtttattgttttgataattgagaaaatgtttgattttgttttttggtttttgaaataaggatttagatgagttaaattttaaataagggattttaagtttatttagaaaatattgtgaaatattaaatggtatataatttgtttttttaaaagaattagtttttttttattatttagaataattagataagttttttttgaaggaaaaagtttggttagagtgtttttaaagtttttttaagatatttgagagttaaatattttaatgatgtgatttaattattattttttttttttaattttaaattttttttttattataaaatttatttagttatgtgaggtagtatgtatattataaataattttgtatttggatttaaaataatgaagagattggagataaatgatagattttttgagtttttatttttttaaaagaaaaaaattggattgatttttttagattagaagaaaatattttgtattaagaaagtattattaaagttgtttatgtatttaatatagttatttaagggaatgattttttttttgaaattttttgatttttgagtttattttatttattatagtataagtttaatgagggtggggatgatatgtttttttgtttattttggtttttttgttattttagaaaatttttggtttaggtagttgaaggtataattttttgtagtttttatttagttaggttttagtaaataaataaaattaagttataagaatatataagaattttagaataattattttttataaatatggatagtgtgaatatttggattttttaaggtagtgtttttgagttgtgagttaaaatttattaatgagttatgaaataaatgtagttaaaataagaagtattaaaaatttaattaaatagaatagaaaatattagaaatgttttaaatgtagtaagtatagtattgtttttgaaattgttgtttttattttatatatttgagtagatatatatatataattttggttttatttattatgttatgatatgttttttggtttatgttttattttgggttgtggttagaataattttaaaaatattttagtaagtttttttttgagttttatattgaaataattaaagtaatgatttttttatatttattatatgaatttgagttgtgtattatttattataagagtgttaaaaaaagttgattaggatttatttgtaaatttaagattttattttgagtaaatttaataatttatagtgatttttttattgttagtttagtttagaatgttatgatgatattttgaatttttaaggatgtagtaggtatttagaaagtatgaagttttatgttgatattaatttattttgtgaattatttttttttatatattattttaattttattgaaaatgatataggattatatgttaggattttggtaaatttatattagtaaaattgttttaattaaatgtgattttttaaaggttattttttagaaaagggataagtttaaagttttagagtaatttattttatttatgtttttattaaagaaaaatatagtttttagtttagtgttgtattgtttgaagttatttttttgtataatagtataatttaatgggaaagttaatgatagattaaaagtgattataagaggttggatgtagttatttatatttgtaattttagtattttgggaggttgaggtaggagtattgtttgagtttaggagtttaagattagtttgggtaatgtagtgaggttttatttttataaaaaattaaaaatttgttaggtatggtggtgtatatttgtagttttagttatttagaaattgaggtagggggaatttgaatttaagaggttgaggttgtagttatttgtgattgtattattgtatattagtttgggtaatagggtgagatttttttttaaaaaaaaaaaagtgattggaagaggtttttttatttaattttgatagtttttttttaaatgtttaataaaagaattattagttagtaggaagattaatttgaaaatgtaattaaattttataaatttaaataaaattagaaagagagagagagagagagatgaagttagaattgtggattattttgttaatagaaatttaatagtattataaatatataggatttgtttaa

SEQ ID NO: 342 - DNA, 2501 bp, Artificial Sequence
  chemically treated genomic DNA (Homo sapiens)
gtttttgtatttttatttttggtagatattttttattggttgtgattttttgttttttgttttattggatttattgtagtgaggggtagagttaggttagaattaagttttttttttgtttatttggagttttgtttgttgtttttttgttttttagtaggttttttgtattagtatttgagtatttattaaatgtttatttgttgttatgtgtaggttttgtttttgattgtagtgtaattttttttggtttatagattatatgggaatttgtagagtgggtgtatgtagggtggggattggggtgtttattttttttttattatttagtagattattagtttagttatttgtttggatgtttaatatttagttatatttataagaaatatgtaaatatttgtttatattttgatatagattattaagaatatatatatggttggtgttttaattgagttattttttttttattttatttatgaaagtaatataagaaagttaagagtgaaaggggtaaaagattatagtataaaggtttttggtgtgttttttaaagatttatataatattgttttaaagggaagttatagtagtttagttgttttttatagattagagaggatggtggggtagttaggagttattagtaaatttaggtgagtagtgtaggattgaatgttgttgtttatttgtaggtgggagtttatgtggagggtgtttttttttgttttttattgggatggtgattgtgtatagtggaaagtatagagttaatgagggataggatggttgtggtggagggaaaatagtgtagggttgttttgtttttttgttttgttttgttaggattggtgggttattataggtttttgtaaagtataaatatatatgtatatataagtatatatatatataggtatgtaatatagatatatatgggtatgtatatataaatatataggtgtgtatatggatgtgtatatttgtagatataaatttagattatatgtttgtgtatatatgtatgtgaggtaagagaatagggtttggaggtagggaatttaaggttaatttgtgttgattttttagaattgaattaaaatgaaaattttatttttttatgtttgaggaataaaaggtttagtagttattttttttgttatattttttttttattgtattttagatgaaaatggaaagtattttggattggtttttttttgtaattaattagattggttattggttaagtttttatgtgtaattttgtaatttttttttagtttttgattggttgttttttgtgattgattatattggttggggttatttttttatttgtatagagtataattaagtaattaatgggaaaattttggagggtatttaaattttagaaaatgttgtaattaggtttttgagttattggttttagtttgtttttattttgtggagtgtattttttttttaataaatttgtgtttttgttgtggtaatatatatatttgggtgtgtatgtaggtatatatatatgggtgtgtataaatatataggtatgtatatagtatatatatatataggggtgaatgtagttatatatatatatatatggataagttagtgaaattttgggtttgttttttttataatattaggtgaatttttttggggttttttatttaatttttttttgtttttgtttttttagttataaatttgggttagtgatataggtttttttttaatggggtgtgtggatagtagatatttgaaaatttaaagttttaaaatataagatattattttaattttaaagtatttagatttttaagtttttgttggtaaagattttattttattttttgttttgatttttaggtttgaatttttgttttgtttatttttattttttttgttttgaagatttaattttaatatataaatttgatgggttattgaattttaaaaattttttagagaatgagagaaaattttattgtgaaggtgtggttggttatttttttttttgtgttggggtttttttgtgttagtgagttttggtatattgatttttgattaaaagaattattatttttatttttggggaaaataggaagagggatggtgttttattaattatatatttagtttaaataagtgttttggtttttttagaaatttaaaaggtagaaaaaaatggatatatttttttttaagaagtttttatattatatattttttaaaaagtatttatattttagttgttatgtaaattaatagttttgttaattttttttttttttgttttggtattggtattaatatttttttttattgtggttttggaaatttttatattaatgaagtagtagaaaggtttattatattgtattggtgtgtggtttttgtatttttttgattttttttttttttttgtttttttttttttttttttttgagataaagttttgttttgttatttaggttggagtgttgtg

SEQ ID NO: 343 - DNA, 2501 bp, Artificial Sequence
  chemically treated genomic DNA (Homo sapiens)
tatagtattttagtttgggtgatagagtaagattttgttttaaaaaaaaaaaaaagaaagaataaaaaagaaaagaaagttaaggaaatgtgaagattatatattagtgtagtgtgatgggtttttttgttgttttattagtgtgaggatttttagggttatagtgaggaagaatgttaatgttagtgttagagtaaaggagaaagaagttggtaaaattgttgatttgtatgatagttgaaatgtaaatattttttaaaaaatatgtgatgtggaagttttttaaaaggggatatgtttatttttttttattttttaaatttttgaggaggttaaggtatttgtttgggttaagtatgtgattgataaagtattatttttttttttgttttttttaaaggtaaagatgatgatttttttgattggaaattagtgtattgaggtttgttgatatagagaaattttaatgtgaggaaaggaatggttagttatatttttgtggtaaagtttttttttattttttgaggagtttttaaagtttagtgatttgttagatttatgtattaaaattaagtttttagagtaaagaaaatggagataaataaaataaagatttagatttgagaattaaagtaaaaagtaaagtaaaatttttgttaatgagggtttgaaaatttaaatattttgaaattagaataatattttgtgttttagagttttaaatttttaaatatttgttgtttatatattttattggaggaggatttgtgttattaatttaaatttgtagttgagaaaatagaggtagagagaggttaagtaaaaaattttaagagagtttatttaatattgtgaagaaagtaaatttagggttttattaatttgtttatgtgtgtatgtgtgtggttgtgtttatttttgtgtgtgtgtgtattgtgtgtatgtttgtgtgtttgtgtatatttatgtgtatgtatttgtatatatatttaagtgtgtgtgttattataatgaaagtgtagatttattgaaaagaaagtgtattttatagagtgggagtaggttagagttagtggtttaggagtttggttatagtattttttggagtttaagtgttttttagagtttttttattggttatttggttatattttatgtagatgaaggagtggttttaattaatgtgattagttgtaggaggtaattaattagaggttgaagggaagttataaagttatatatgaagatttggttgatgattagtttggttggttgtgggaggggattaatttgaggtattttttatttttatttgagatgtagtggaaagggggtatagtaaagggagtagttgttgaattttttgttttttaggtatggagaggtggggtttttattttgatttagttttaggaagttagtatgaattggttttaggttttttgtttttagattttatttttttgttttatatgtatgtgtgtataaatgtgtaatttaaatttgtgtttatagatgtgtatatttatgtatatatttgtgtatttgtatgtgtatgtttatgtgtgtttgtgttatatgtttgtgtatgtgtgtgtttatatgtgtatgtgtgtttgtattttatagaaatttgtggtggtttattagttttaatgggataggatagagagatagagtagttttgtattgttttttttttattatagttattttgttttttattggttttgtgttttttattatatatagttattgttttaatgagaaataagaaggagtattttttatatggatttttatttgtaagtggatagtgatatttagttttgtattgtttatttgggtttattgatgatttttggttgttttattattttttttgatttgtgagaaatagttaagttgttgtgatttttttttaggataatgttgtgtaaatttttgaaggatatattgaagatttttatattgtgattttttattttttttatttttggtttttttatgttgtttttatgaatggaatggaaaaaagatgatttagttaaggtattagttatatgtgtatttttgatggtttatattggggtgtgagtagatgtttgtgtattttttgtgggtgtgattggatattagatatttggataagtgattgaattaatgatttgttgaataatgaaggaggaatagatattttagtttttattttatgtgtatttgttttgtaagtttttatgtgatttgtagattaggggaaattatattgtggttaagggtagagtttgtatatgatagtaagtgagtatttgatagatgtttagatgttagtgtagagagtttgttgggagatgaagagatagtaggtagagttttagatgggtaaggaagaggtttggttttagtttggttttgttttttattgtagtggatttagtggggtagaggatagagggttataattaatgagggatgtttgttaaggatgggggtgtagaggt

SEQ ID NO: 344 - DNA, 2501 bp, Artificial Sequence
  chemically treated genomic DNA (Homo sapiens)
tgttttttatttgaaaaagataatggtagtttttattttagttgttttatttaatatgaggttagatttaggggtgtagggatgtttttaaggttattttaatagatgtgattggtattttatattgggattagttaggttttattgattaggtttatttaattagaattattttagaaggtggggttgaaatttattaaggtttttagaatattgtattttagggtaattagtttttgtatgggaggagaggagtattttttgtattattttatggtgttattaaaagttgaattatgggttggtttaattttgtagagaagagattatttattttatttgtggaaatttattttttagtgatattaatgttttttaataaatttaattttgggtttgagtgatggttggtgtaaaaaataaatttaagattttagtgttttttagaagtttggatttttagggattttgttgtgggttataggatgttattggttttttttttttgtgggttaagtgtgggggttatgtggatttttttatgagtagatgttattaggattattggttttagtttttttttttatagttgtagtgggggttggggttaggggtattttagggagggtttttgtatgagtttgtgttatagtgttgggtgtttggtggagggattaagttgattgttttaggtgagtttttttttttttttttttttttgtttttgggataatttttgttgtttttgtttgtttttgtattttgttttaatttgtggttagtttttttttttgtattttaggtttgagtaaggatttttgttttttttgtttagatttttgtttgttttagtaggttattataattattttatttttgattgtaggggtaggggattagatagaatgatttattgagttttgtttgtttgtttgtttgtttgtttttttttttttgtttgtttttttgtttgtttgataggtgtaggttgggtttttaagttttgttttgttttggtttttttagtttgggtttttgttggaatagttttgtttttgggttatttgggttttattttttggggaattgggaataaggggtttgagggaggtattttttgggagattttagaaggatttagtgtttttggggttgatgtttgggaattatagagttgggatttagagttaggatttagatttagaatgaggtaggaggtggaggggttgttttgggtgtttgggggttgttagggattgagttttgagttagtttgagatttaggaaattttgttaggagggagaagggagaagtagattttggatattagaaagttaggggaagggttataaaaggagtggatgtgatggaagggtgggtttttgggtttttttagaatatattttttgtgtttagggggattagaggggtagagtttattgtgtgaaagttttattgttatgattaggtagttgggatgtggggtggatgttagaaaagattttatggaataagagagagtttaggatagtaggtaggttttttgatttttttaggtttttgttttatatatgggttttagaatatatatttggttggaatagtttgagggattaaaaggttttagtattttatagagttgaggagttaggttagaaaagtaattttagagtttgttgtgtaggggagatatagagttttttttatttgttaggatggtaggaggggatagggttagggtgttgagggttagatgttggtgttgggggttaaggttttgagagattttaggataggtggttaggtgtttaaggtaaaatagttttttgtgtagattaggatatagtggaaaatattttgatttttttgtttggtatagatttttagatatagagtttttgaataagggtattttaatattttattatatattgaggttaggggttttttaggtggatattaggattttgattttttgttttttatttattttgtaggttagtttaaggttgtttttttggttattttgtttttgtttttttttgaggagttttaagttaataaggttatattggtgtgttttataagtgatttttatttgggagttgtgatagtggtttggaaggtagatagtagttttgttaaggtgggagtggagattattatattttttaaataaagtaataataagtatgtggttagtagttatttgagtttgatgtttgagtagtggaagttttatagaagttatagttgttaggttatgtatgaagggagtattgtggagaagatagtggtttttatagaatgtttataggtttttaatttttattttttattatgggagattagagttgtaggattttaggggaggggtttttttttttattttaaggtattaagtttttttttttgtatttaataaatttttaataaatatttttattgttaattagaaattttgttttattttattttttttttttttatatataatttt

SEQ ID NO: 345 - DNA, 2501 bp, Artificial Sequence
  chemically treated genomic DNA (Homo sapiens)
ggaattatatgtgagaaaagaaaaaatgagataaaataagatttttgattgataatgagaatatttattgagggtttattgagtgtagggagaagggtttgatgttttggggtgggaggagagattttttttttgggattttgtagttttagttttttgtggtggggggtgagggttgagaatttatgaatattttgtaggggttattgttttttttatggtgttttttttatgtgtgatttggtagttgtagtttttgtgggatttttattgtttaggtgttaggtttaggtagttgttggttgtgtatttgttgttgttttgtttggagggtgtggtggtttttatttttgttttgatggggttgttatttgttttttaggttattgttatggtttttgggtagaagttatttatgagatatattagtgtggttttgttggtttgaagttttttagaggagggtgggaatagagtgattgagggggtagttttgggttgatttgtggggtggatgaggggtagggggttagagttttggtgtttatttggggagtttttgattttagtatatgatgaggtgttggggtgtttttgtttaggggttttgtgtttgaaggtttatgttaggtagaggggttagggtgttttttattatgttttgatttgtatggggagttgttttattttagatatttgattatttgttttgagattttttggggttttggtttttaatattgatatttgatttttagtgttttgattttgtttttttttgttattttgatagataaagagagttttgtgttttttttgtatagtgaattttggggttatttttttggtttggttttttagttttgtgggatgttggggttttttggttttttaggttgttttagttaaatgtgtgttttggagtttgtgtatggggtaagggtttggggggattggagagtttgtttgttgttttgggtttttttttattttgtggagttttttttggtatttattttatgttttggttatttggttatagtagtggggtttttatgtagtggattttgtttttttgatttttttgggtataggggatatgttttgaagagatttaggagtttgtttttttgttatatttattttttttgtgattttttttttggttttttggtgtttagagtttgtttttttttttttttttttgatggggttttttgagttttaggttggtttagggtttagtttttggtagtttttagatgtttagggtagtttttttattttttattttattttgggtttggattttggttttgggttttagttttgtgatttttgagtattagttttgagggtattgggtttttttaaagttttttaggaggtgttttttttagattttttgtttttaattttttaggagatggaatttaggtaatttaagggtaaagttgttttgataagaatttagattgaggaggttagaatagaataaggtttagagatttagtttgtgtttgttagatagatagagagataaatagagagagagagatagatagatagatagatagatgaggtttagtaggttattttatttagttttttgtttttgtggttagaggtgaagtggttgtagtgatttgttgaggtaagtaagggtttgaatagggagggtagaggtttttgtttaggtttgggatgtagggagaaaggttgattataagttgagataagatatagaaataaataaaaatagtagaaattgttttaagagtggggaaggagaggggagaagagatttatttaggatggttagtttggtttttttgttgaatatttaatattgtgatataggtttatataaaaattttttttgggatgtttttagttttagtttttattgtagttgtgaaggaggaagttggggttagtggttttggtggtatttgtttatgagggagtttatatggtttttatatttaatttatagagagaggggattggtgatattttgtgatttatagtaggatttttggaaatttaggtttttggaggatattgggattttgaatttgttttttgtattaattattatttaggtttaggattgaatttattagagggtattagtgttgttaaggagtgaatttttatagatgggataggtggttttttttttgtaaagttgaattaatttatggtttaatttttggtaatattatggggtggtgtagagggtgtttttttttttttatgtagaggttgattgttttagagtgtagtgttttgggaattttggtgggttttagttttattttttggagtagttttagttggataggtttggttagtgaggtttggttggttttaatatgaagtgttagttatatttgttagggtaattttgggagtatttttgtatttttgaatttggttttatgttgggtgggatagttagggtggaggttgttgttgttttttttaaatgggggata

SEQ ID NO: 346 - DNA, 2764 bp, Artificial Sequence
  chemically treated genomic DNA (Homo sapiens)
aattatatattttgttttagagtttttttttgttgttttggagtgtagtggtatgattatagtttattgtagtttttaatttttgggtttaagttatgatttttttgttttatttttttgagtagtgggtattataggtatgtgttattatgtttagtgaattaaaaaaattatttttgtgtgtgtggagatggagttttgttatgtttttaggttgttttttttttttttttttgagatggagttttgttttgttgtttaggttggattgtggattgtagtggtgtaattttggtttattgtaagttttgttttttaggtttatgttatttttttgttttagttttttgagtagttgggattataggtgtttgttattgtgtttggttaattttttgtatttttagtagagatggggttttattttgttagttatgatggttttgattttttgattttatgatttatttgttttggttttttaaagtgttgggattataggtgtgagttattatatttggtttatattttgtttttttttttttttttttttttttttttttttttggagatagtttttttttgttgtttaggttggtgtatagtggtgtaattttggtttatttgtaatttttgttttttgggtttaagggatttttttgttttagttttttgagtagttgggattataggtttgtattgttatatttggttaatttttgtatttttagtagagatagggttttattatgttggttaagttggttttgaatttttgattttaggtgatttgtttattttggttttttaaagtgttgggattatgtttttttttttttttttttagatagggttttgttttgttatttaggttagaatgtaatggtaggattttggtttgttgtaatttttattttttaggtttaagtaatttttttgttttagtttttttagtagttgggattatagatatttgttattatgtttagttaatttttgtatttttagtagagatggggttttgttatgttggttaggtttgttttgattttttgattttaggtgatttgtttatttttttgttttttattgaggtttttgttagttaggtattagtatagggaaagggtttaagggtagtgtgtggttatggttttgtttgtagaagatggtagtaggagtaattttttttatatttatttaatatagttgtttatgattagtttggttaggttttagggtagtgtgtggagatttattgtgattttagttttaggtgtttttttagttggagaggtagtttatggttgattatagtgtaaggttagatgtttttttttgtttttgtgatggtagaaatgaggtttgttttatgattttattttaagtatttgttatagtggtgtttttgaatatgttatgggttatttatttatttattaaatattaagtgtttttataatattttatggggattttattttttattttgtttttgagatagggttttattttgttatttaagtttgagtgtagtggtttgattattgtttattgtagtttttaatttttgggtttaagtgatttttttgttttagttttttgagtagttgggattatagatatatattattatgtttggttaattttttttatttttttatttttgtagagatggagttttattgtgttgtttaggatggttttgaatttttgggtttaagagatttatttattttggttttttaaagtgttgggattataggtatgagttatggtattaggttaagttttatttttattgggaatggggatgatgaaggttaggagtgttttggtttggagaagtttaggttttttagttttttttttgatggagttataattgttagggtttattttttttatttatttataagtagggtttatagagtagagtttttgattagaagtttttttaaggttaggttgtagggaaggtaagtagaaagagtatttattgttttaatttgattttattgaaaaggaaatatataaaaattatgtataaaaaaaattaattaaatatgtatagaaaatttattttggtatttatagtagtgtatatatagtattttataggttgggttatttttttttatttttagattttttttttttttgagatttttttttttttttgattttttgttttttttttagtgtttggttttggggattaaggttggggtggttttagttaaaattttttattttttaaatgaatgttagtggttatatgtgttttttttaaatttatgtaatgggattgatggggtggggggtggttatgggtagagtataggatttatagtttgggttttttttggttattttttgatgaaggtgaggtaggtatgtttattatttgttggttggtttagggaagatggttgggtgttgggttggagtaattggtaaatgagttttattttttggttttaggaggttagtggttatgtttggtttatttgttttttatgggtttttttttaggaggagggggggaagtattaggggtttgaggttaggtttagagtgaaggagtattgagaggagagttttttttttttagtgttatttttgtagttggaatgggtattagtataatagttttttttgagatggtggtgggtggtagaggtgggtggtttagtttttatttttttggttattgttattttttgatgttgagtttattagttgttttttttttggttttttg

SEQ ID NO: 347 - DNA, 2764 bp, Artificial Sequence
  chemically treated genomic DNA (Homo sapiens)
taagaagttaggagagggatggttgatggatttagtattggaaggtggtggtgattgagggggtggggattgagttgtttgtttttgttgtttattattattttaggaaaggttgttgtgttggtgtttgttttagttgtaggggtgatattgggaggggggggttttttttttggtgtttttttattttgggtttggttttaggtttttggtgtttttttttttttttttgggagggggtttgtgaagagtaaatgagttaaatgtgattattagttttttggagttagagagtggggtttgtttgttggttgttttagtttggtgtttagttattttttttgagttagttggtgggtggtgggtatgtttgttttatttttattagggggtggttaggaggggtttagattgtgaattttgtgttttgtttgtgattgttttttgttttattaattttattgtataggtttagagagagtatgtgtgattattggtatttatttggggggtgggagattttggttgaagttgttttagttttagtttttagggttaagtgttggggggaagatggggagttagggagggggggaaattttggaagagggaggagtttgggagtggggagggatggtttagtttgtaagatattgtatatgtgttgttgtagatattggaatgaattttttgtatatgtttggttaattttttttgtatatgatttttgtatgttttttttttaataaaattagattggaatagtggatattttttttgtttgttttttttgtagtttggttttggagaggtttttgattgggggttttgttttgtgagttttgtttgtgagtgggtgggagaggtgggttttggtagttgtggttttattagaagaaaggttaaggggtttgggtttttttagattgggatgtttttagtttttattatttttatttttggtaaaagtgaagtttggtttggtgttatggtttatgtttgtaattttagtattttgagaggttgaggtgggtagattttttgaatttaggagtttaagattattttgggtaatatgatgaaattttgtttttataaaaataaaaaaataaaaaaaattagttaggtatggtggtgtgtgtttgtagttttagttatttaggaggttgaggtaggaggattatttgagtttaggaattggaggttgtagtgagtgatgattaagttattgtatttaagtttgggtgatagggtgagattttgttttaaaaataaaataaaaagtgaagtttttatgaggtgttgtaggggtgtttgatatttaatggatgagtgaatgatttgtaatatatttagaggtattattgtgataagtgtttgggatagagttatgagatagattttgtttttgttgttatagagatagaaagggatatttggttttgtattgtgattagttgtaggttgtttttttagttggaggagtatttggagttaagattatagtgagtttttgtatattgttttgaggtttaattaggttggttataagtggttgtgttgagtaaatgtagaaagggttgtttttattgttattttttgtaaatagggttatggttatatattgtttttgagttttttttttgtgttgatatttgattggtagagattttaatgagaagtagggaggtaggtagattatttgaggttaggagattgagatgagtttgattaatatggtgaaattttgtttttattaaaaatataaaaattagttgagtgtggtagtgagtgtttgtaattttagttattgaagaggttgaagtaggagaattgtttgaatttaggagataaaggttatagtgagttaagattttgttattgtattttagtttaggtgatagagtaagattttgtttggaaggaaggaaggaagggtataattttaatattttgggaggttaaggtgggtgaattatttgagattaggagtttgagattagtttggttaatatggtgaaattttgtttttattaaaaatataaaaattagttaggtgtggtgatgtaagtttgtagttttaattatttgagaggttgagataggagaattttttgaatttgggaggtagaggttgtaagtgagttgagattgtattattgtatgttagtttgggtgatagagggagattgtttttagaaaaaaaaaaaaaaggaaagaaagagaaagaagtaaggtataggttaggtgtggtggtttatatttgtaattttagtattttgggaggttgaggtgggtggattatgaggttaggagattgagattattatggttaataaggtgaaattttgtttttattaaaaatataaaaaattagttgggtgtggtggtgggtgtttgtagttttagttatttgggaggttgaggtaggagaatggtgtgaatttgggaagtggagtttgtagtgagttgagattgtgttattgtagtttgtagtttggtttgggtgatagagtgagattttgttttaaaaaaaaaaaaaaagaatagtttagaaatatagtaagattttatttttatatatataaaaataatttttttaatttgttgggtatggtggtatatgtttatagtatttattatttaggaggatgaggtagggggattatagtttgagtttaggagttggaagttatagtgaattatgattatgttattgtattttagggtaatagagggggattttgaagtagggtatataatt

SEQ ID NO: 348 - DNA, 3001 bp, Artificial Sequence
  chemically treated genomic DNA (Homo sapiens)
agatttgtatttggtttttagtttaatttttatttattattgttttttttatattatttgattgtgtttttttaaatataatatttttatgttttatgtaattttgtaaagtattgagttaaggattggagatgttaataatggttttggtttttaaggggttttttatttgtttttttggtttttttttatttaattatttaaaatataggtagagaatttttgaaaatatagtagatttaattatttttttgtttgaattttttggtggtttttaatgtttagagtgtaaagtttaggagtataaggtttttttttatttttttataaattattttgtgattttaggttttagtttagagtttggatagtttttgttttagtttttgtttaggatttttttttggtggtaattttttttgtggttttgtagtattattttttagtttgggttagaggtttttttttagttttttagtttttaagtttttttttgtaattgtatttattatttttaaattattgtttggttgtttgtttttttttatattggtttttgagtagaaataaggattaatttatgttttttagtttttatttttaatgaaatattttaatagatattgaaaaatgtttttgaattaatgagataagtttattgataataaataggtaaataatagtaatgtgttaatagtggttgtttttggtgagtagaattttgaggtttgttttttttattttttggtattttggttgtttttgtaatgattgtattttgtttttgtaattataaaggatagtaaaggaaattttattttgaaaataatataaagggatttggggattttaaaagaaggtgattttttttgtttattttagagaattaggaaaggagtgtttaaagatttatagaatttttataagtgatgttgggggggggttagttagttagggtgtatgttggttagtgagtggggtgggttttgggtttgggagaagttagattagtgttttgtatagggttttgagggtaagatgaggaattttgatttaggtttttgaatttggagagttatagaaagtttgtgagtttaggagaagtgttttgagtttggtatttggagtagtttaaggtagtagtgagtaagtttaaagatgtaggagggagggtggggtggaggagtagagagaaaatagaagttgtttatagattttttttttttttggggtaattaaattttaagtgtaggaagtgtttggggattgtttagtttttagttgtgttattatttggtgataggtatttgttaattatttttaaaagttttttatttgttattttatttagattgtgtgtttttaattttttttattttatatgttgtgtttaatgaaaagtatggttagtgagtgaaggtttgtaaggagatagatgagggtgaaattaagttaggtggtttttttttaaatttttgtaaagtagaagggttttttattttggtagtaggttttggttaaggggtttttagttttgatgatttggggaagagttttttaaagtagaatgtttggtttggtgtttagattaaatgtgggggaattggaagggtgaggtttttatgtaagtttgtggtaaaagtggtagggagtggttgtttgtaaagattttaagatggtttgaagaaggagtgggtggtgggtgggggttagggtgattaggtggggaaatagggagagggttgggttttgtggggtagttggggttggggtttgttgatttgggtgggggtggggggtggggggggtgtggtttgggtggggttggtggggtgggaggtgtggttggtggggggagtgggggtggttttttttggtatatgtgtattgtagtgggttgtgtgttttaaggagtggtattttttaaaagtgtagttggagattagtttatagttgtttgtatttgtatttagtgttaggttttgttagttttagttgtgtgtgttttttagttttgtatttgtttggtttaggttaagttagtttttattatgttggttaaaggaggtattaagtgtattaaatatttgttgtttggatttaattttattttttgggtgagtgagtgtgattgttgtgtgttttttttagggtttatttgtttgtgggttttggatattggttgtggttgtgagtgttggtagttggtattgtttgtattgggtaggtattgggtgggaagagagagtgttttgtggttgttagttggttttaaggttgggtttagagttgggtgggatggttgtgatgggtgtatttgggtgggggtttattattgtttagttggtgtggggagttgggtttttttgagatgaggtgtgtgggagggttttgagtattttagtttgtttaggatttgagttggggtgtgtgtttgtttttagtttaagtttttttgagtgttagagaggaaggtagggagaagtggagtatttttttttgggttaaggttaaggaggattgtggtgagtagtatggtttgtgattgggtggggttttttaggtagtagggggtgttaggaagggagggtgtgggtatggtgagagtttagttaagagtggtttttatttttatgtaggagtggtaggggtgttttggttgtgggtttggttttgggatttagtttttgagagttgggggtttttttatttttgaggaggaattttgtaggtttttgtttttttagattttgattttgagttattgtgagagtgttgaattttttggtagttttttgaaagattagtttgttttgattttttttaaggatgataagtatttttattggagagaatttagagtttgggagaggagggggtagatatttatttgtgtttttagtgggatgagttttgtgtgtgtatttttgggagagattaggtgttagttagttgtttgtttaggagagttttggttttgtttttttttttttttgttagt

SEQ ID NO: 349 - DNA, 3001 bp, Artificial Sequence
  chemically treated genomic DNA (Homo sapiens)
gttggtggggaggggagagggtaaggttaaggtttttttgggtgggtagttggttggtatttgattttttttggaaatgtatatataggatttattttattagaggtgtagataggtatttgttttttttttttttgaattttgagttttttttagtgaagatatttattgtttttgaaagaaattaagataagttagttttttagggagttattagggagtttggtgtttttatggtggtttagaattaaagtttgagggaatgggggtttgtgaggtttttttttaagggtggaggggtttttgatttttagggattgggttttggggttggatttgtggttgaggtatttttgttgtttttgtgtaaaagtgagagttgtttttggttgagtttttgttgtgtttgtattttttttttttggtgttttttattatttgggagattttatttggttataagttatattgtttattatagttttttttggttttggtttaaagaggggtgttttgtttttttttgtttttttttttggtatttggagggatttgagttgggagtagatatatattttagtttaaattttaggtgagttaaagtgtttaggatttttttgtatgttttattttaagagggtttggttttttatgttggttgggtggtgatgagtttttatttgaatgtgtttgttgtggttgttttgtttggttttggatttggttttggagttagttggtagttgtagggtgttttttttttttgtttggtgtttgtttggtgtgggtagtgttagttgttggtatttgtggttgtggttagtgtttggggtttgtgaataggtgggttttgagaggagtgtgtggtagttgtgtttatttatttagaagatgaagttaaatttgaatagtaggtatttgatgtatttggtgttttttttgattggtatggtgagggttaatttagtttgggttgaatgggtgtgggattggggggtgtgtgtagttgggattggtgggatttggtgttggatatagatgtaggtggttgtaggttggtttttggttgtatttttaaaaagtgttattttttagggtgtgtgatttgttgtggtgtgtatgtgttgggaaaagttgtttttattttttttgttggttatgttttttgttttattggttttgtttgggttgtattttttttgttttttgtttttgtttaggttggtgagttttggttttagttgttttgtggagtttgattttttttttgtttttttgtttagttgttttaatttttatttgttatttattttttttttaagttgttttggggtttttgtaggtagttattttttgttatttttattgtggatttatgtggaggttttgtttttttggtttttttgtgtttggtttgggtgttggattgggtgttttgttttgggagatttttttttgggttgttagggttaaaggttttttggttaaggtttgttgttagagtgaggggtttttttgttttgtgaggatttaaagggaagttgtttggtttaattttgtttttgtttgtttttttgtaaatttttgtttgttgattatattttttattgggtatagtatgtggggtaggaggaattagaagtgtgtagtttgggtgggatgatagatgggaggtttttggaagtaattagtaaatatttattattgaataataatatagttgagggttgggtagtttttaagtgttttttgtatttgaggtttagttgttttagagggaaaaagggtttgtagatggtttttgttttttttttatttttttattttatttttttttttgtgtttttggatttgtttgttgttgttttgaattgttttagatgttgagtttggagtgttttttttgagtttataaattttttgtagttttttagatttaaggatttaagttgaaattttttgttttgtttttaaggttttgtatagagtattgatttgattttttttggatttagagtttattttatttgttggttggtatgtgttttggttggttggtttttttttaatgttatttgtaggaattttgtgggtttttaaatattttttttttgattttttggagtggatgaggagagttatttttttttgaagtttttgaatttttttgtattatttttaaaatgaagttttttttattgttttttatgattataaaagtaagatatagttattatagaaataattgaaatattaagaagtgaaaggaatagattttaaaattttgtttattagaaatagttattgttagtatattgttgttatttgtttgtttattattagtagatttgttttattggtttaaaaatattttttagtatttattagggtattttattaggggtaggagttgaaaaatatggattagtttttgtttttgtttagggattagtgtgggaggagataggtagttagataatggtttgagggtgataggtgtagttatggggagaggtttgggggttaagaggttaaggagaggtttttgatttagattgggagatgatgttgtagaattatagggaaagttgttgttaagggagaattttgggtaaaggttggggtaggggttgtttgggttttgggttggagtttggagttatggggtagtttgtgggaaggtgagaaagagttttgtgtttttggattttgtattttgagtattaggggttattgaaaggtttaagtaggggaatggttggatttgttgtgtttttagaggttttttgtttgtgttttaggtagttgggtgggggaaggttggaggggtaggtaggaagttttttgaggattaggattattgttggtatttttagtttttggtttagtgttttatgggattgtatggaatatggagatgttgtatttggggagatgtaattaggtaatatgaggggagtagtggtagatgaaagttgagttgaggattaggtgtaaattt

SEQ ID NO: 350 - DNA, 3001 bp, Artificial Sequence
  chemically treated genomic DNA (Homo sapiens)
gtatagataatatagtttgaagaagtaagattggtgttggatagattagggtggtatagttattaatttattgtatattttaaaatagttagaagataattttgatggtgtttaaattttgtaattttaatatattgggaggattagttgaagttaggagtttaagaatagtttgggtaatagtgagattttattgttataaaaaaatttaaaaattagttaggtgtgggtagtgtatatttgtaattatagttatttaggaggttgagatgggagaagtgtttgaattagggaggtggaggttgtagtgagttgagatggtgttattgtattttagtttgggtgatagagtgagattttgttttaaaaaaaaaaaaaggttgtgtgtggtggtgggtgttttgtaattttagttattattttggaagttaaagtatgagaattgttttaatttgggagatggaggttgtagtgagttgggattatattagtgtatttttgtttgggttgtagagtgagatttttaaaataaaatattattttggtagtattgtagagaatgaattggtagggttaagattatttggagatttgtaataatattttaggtaaaatatgaggaaggtttaaattagggtaatgaatgaaggttggagagaatatgggtttgaggaagtttaaggagatagtatttgtatatttggttgttatttgagtgaagtgaaaggagaagtggtattgaaaatgttatttggtgtgttttgtttggagataattaatttgaagtgatgtttgttgtaataggtgtgtatagtgttgtagaggatgtttatagtttagtttagggttggttggaagtaatatgtgggttttgaagttagttggtttgggggttattgttttaaatagagaagataggaaggaataggagttgagtatttagaggtatttttttttgtggtttaatattatatttatgggttatttttaaaagatgtgtttttatttttttggggatttttggaaattttgttatgattttgtggaatgttttgtggggaagtttttttaggttattagagggtgttaggtgggttgtagtgattttagagttgtgttatggttgaggtgtgggtgtagttgtttttgttttggtgtttggagttggtgagttttgtatggagtgtgtgtggttttttgggagttggattagggtttgggatgtggtttatttattgtagtttgaagtgaggatggtttgtttttttgagtaggttttttttaggtgtttttgttaggtttttgttttaggttggtagaagggggttttagagtgggggtagtgaagggttaaagatggggattgaaattgggtgggaattggtggtgaggattttgtttttaatgtgtggtgtagttttatttttggaagttatgtttatttagtgttgtttttttgaagttttaatttagttggtttttttttgttagtgattttttttttgtttttttgtggttttggaggagtggtttagggtttttggggttgagttgtttatagattgaggtgtggatttgggtgtggttgttattttgtagtttagtgataagattgttttgttaatttgaagggtatgtattttgagtgttttttttaatttttgggtatttttgggtgagtattttggggataaggttttaagtatagagaagaaatttgttttttttttgtaataatgttttttttagttttagaaggataaagtgggttttaaaatgtggtatgtttatagttataagggattgtaattttttttgtgtttattggaggggagaggagtgttaatagtgagtgggggttttttggttaagattattattatttatttattggttttattgttgttgtaggtgggtatgtggaatttgaggaggaggtaattagttagttgatttaatttgagttaagagatttatgtttgggattattttgggtgtgggttgagggaggggtaagtaaaaggatttggaagagttaggtattggtttttttgatgtgttttttttgatttttagttgttggatggagggttttgagaattttgggaggagagtggattatatttgttttagggttagtttttttgggtttttttgggtttatgggaggtgagataagtagttgggagaagtttttttatagattagtttttatttgttttggttataagggaaataatagtatataagtgggttggaatttttaaatttataatttttatttatgtttttgttgtgttatttgtattatttatgtttttagtttttggttattattttgttttattttaaagttgtattaataaagttttaaaaagtgatataaagggttgggtgtggtggtttatgtttgtaattttaatattttgggaggttgaggtgggtggattatttgaggttagaagtttgagattagtttggataatatggtgaaattttgtttttattaaaaatataaaaattttagttgggtgtggtggtaggtgtttgtaattttagttattttggaggttgaggttggagaattgtttgaatttaggaggtagaggttgtagtgagttaagattatgttattgtatgttagtttgggtgataagagtgaaattttattttaaaaaaaaaaaaaaagtgatggaaagtttttatttttgttgttttttttttttagtttgtttatttttttaggttgagttggggtttatttaaatattattatattgttttgtatttatttgtgattttttaggaattatagtagtagttgtaggtagggttggtagtgagggaaggaaatagggtttaggggagtttaagtaatttggttttgattgtgattaggagttgggtgggggtggtgggggtagttagagataatgaagaatatgtaatgttttttttttttgtttttgtttttttttatgaaatttgtgggtaggttttg

SEQ ID NO: 351 - DNA, 3001 bp, Artificial Sequence
  chemically treated genomic DNA (Homo sapiens)
taaaatttatttgtaggttttatggagaaaggtaggagtaaggggaaagggtattgtatattttttgttatttttgattatttttgttatttttgtttagtttttaattatagttagaattaggttgtttgggtttttttgagttttgttttttttttttattgttagttttatttgtaattgttgttgtgatttttgggagattatgagtagatatagaataatgtgatggtatttgggtaaattttagtttagtttaggagggtaggtagattaggaaaagaaaatagtaaaagtgagaattttttgttattttttttttttttttaagatggagttttgtttttgttgtttaggttggtatgtaatggtgtgattttggtttattgtaatttttgttttttgggtttaagtaattttttagttttagtttttagagtagttgggattataggtgtttgttgttatgtttagttaaaatttttgtatttttagtagagatggggttttgttatgttgtttaggttggttttaaatttttgattttaggtgatttgtttattttagttttttaaagtgttgggattataggtgtgagttattgtatttggttttttgtgttattttttgagattttgttaatatagttttagggtgaaataaaatggtggttaaaagttgagggtgtggatggtatagatgatatagtagggatatgggtgagggttatggatttggggattttagtttatttatgtgttattgttttttttgtagttaaggtaggtaggggttgatttatggaggagttttttttagttatttgttttattttttataaatttagagggatttaagagaattggttttggggtaggtgtagtttattttttttttaaagtttttgaagttttttgtttagtagttgggagttagagaagatatattagaggggttagtgtttgatttttttaagtttttttgtttgttttttttttagtttatatttaagatggttttaggtatgggttttttggtttaggttggattagttgattggttattttttttttaagttttatgtgtttatttgtaataatagtggggttagtaggtgaatggtggtggttttggttagggagtttttatttattgttgatattttttttttttttagtggatatagagggagttgtagttttttgtgattatgaatatgttatattttggggtttattttatttttttgagattgggaaaaatattgttgtggggaaagggtaaattttttttttgtatttggggttttgtttttagaatatttatttgggggtatttagaggttgggggaaatgtttagggtgtgtgttttttgggttagtaagatagttttgttgttggattgtagaatgatggttatatttaggtttatattttgatttgtgggtagtttagttttagggattttgggttgtttttttagggttgtaaaagggtagaaagggggttgttggtagaaggaagttagttgggttaaggttttagaagggtggtattgggtgggtgtgatttttaaaaatggggttatattgtgtgttgggggtggggtttttgttgttagtttttatttgattttagtttttatttttggttttttattgtttttgttttggggtttttttttgttgatttggagtggaagtttagtggaggtgtttgggaagggtttgtttgagaggataagttgtttttgttttaagttgtagtgaatgggttatgttttgagttttggtttggtttttaggaggttatatatattttgtgtgaagtttattgattttggatgttgggataggagtagttgtatttgtattttggttataatgtgattttggagttgttgtggtttgtttggtgttttttggtggtttagagaagtttttttatggaatgttttgtggggttgtagtggggtttttgaaagtttttggggaaataagggtatattttttgaggatgatttatgggtataatattaaattataaagaagaatatttttaaatgtttagtttttatttttttttattttttttgtttaggataatgatttttagattgattgattttaggatttatatgttatttttaattagttttaagttgaattgtaagtattttttatagtattatgtatatttgttatagtaggtattattttgaattaattatttttaagtgaaatatattaaataatatttttgatattatttttttttttattttatttaaatggtaattaagtatgtagatgttatttttttaaatttttttaaatttatgttttttttagtttttatttattgttttagtttaagttttttttgtattttgtttgaaatattattgtaagtttttaaatagttttgattttattagtttattttttatagtgttgttagagtgatgttttgttttgagagttttattttatagtttagataggagtgtattggtgtgattttagtttattgtaatttttattttttaggttgaagtgatttttgtgttttagtttttgaagtagtagttgggattatagggtgtttattattatgtgtggtttttttttttttttgagatggagttttgttttgttatttaggttggagtgtagtggtgttattttagtttattgtaatttttatttttttggtttaagtgttttttttgttttagttttttgagtagttgtgattatagatgtgtattatttatatttggttaatttttaaatttttttgtaatgatgaaattttattgttgtttaggttgtttttgaatttttggttttaattgatttttttagtgtgttgggattataggatttaggtattattaaaattattttttagttgttttgaaatgtatagtaaattaataattatgttattttgatttatttaatattagttttatttttttaaattgtattatttgtgt

SEQ ID NO: 352 - DNA, 2457 bp, Artificial Sequence
  chemically treated genomic DNA (Homo sapiens)
tttatatatagaatttttttttttttaggtagttttgtttttttatttagtttggagtgtagtgttgtgattttggttgattgtaatttttgttttttggttttaagtgatttttttattttagttttttgagtggttgtgattattagtgtatattattatgtttggttatttttttttattttttatggagagatgggtttgttatgttgtttaggttagttttgaattaagtaatttgttggttttggttttttaaagtgttgggattataggtgtgagttattatgtttggtttgtttttgaagaaatttaagagtttaagtaagtttgtattgttgagtattaggattgggttttggttttaatgattggattttgaaggtagttagttgatttgtttttagttattatatgaaaggtattttattttttttttttttttttaaatggagttttgtttttgttgtttaggttggagtgtaatggtatgattttggtttgttgtattttttgttttttgggtttaagtgattttgttgttttagttttttgagtagttgggattataggtatatgtgttattatatttagttaattttgtatttttattagagatggggttttattatgttggttaggttggttatgaatttttgattttaggtgatttgtttattttagttttttaaagtgttgggattataagtgtgagttattatatttggtttatattaaaggtattttataatttattttgttttgttgtttgggattttttgaattttgttttttttttatttatttattttgatttttttagagttagtttttgtaagttgggaatatagtatttaaatgttaaattggtatagaatgattttatttattggtataggtgaaatttttataaataagtaaagttttgtaaaattttgtaagatttttaaggaaaagatgttatgaaggatgaggaggttattaagtttttgggagttgtattaatattattaggatttttttttgaagaggtttatttatttatttatttatttatttatttattttttgagatagagttttgttttgttgtttaggttggagtgtagtggtgtgatttttttttattgtaagttttgttttttgggtttatgttatttttttgttttagttttttaagtagttgggattataggtgtttattattatgtttggttaattttttgtaattttagtagagatagggtttttttatgttaggtaggatggttttgattttttgattttgtgatttatttgttttagttttttaaagtgttgggattataggtatgagttattgtgtttggttgaggtttattttttgatgaaataaatttttgagtaaatataattttggaagagattaaaatttttttaaagtggattaggagataataattaattaattttttagtgtttaggatggtgtttagtatatattaaatgtttataatgtattgtttttttgaattttaatttttagagatattattatttaattttatagatgaggaaataagtgattatatataatttttgggttatttagtttattagtggtagagttgaaaatagggagttttagtttagaaaatgtttttaatttttataataagggtaagagaattttgatatgtgatggtgtgtttttgtttaatatttataagatggtgtagtaaatagtggttagggttttagtttttttatttattagttgtgatattggttagttaggtttaagaatttgttttagaaagatagtaattgtttaaattatagtttatattatttatggtagtttagaattaaagtaggtagtaattaaggtggaaaagtttttagttattttaaaaagtgttaggtttattttagttggattaatttttattatagtatatagataaatatttggagagaaaataagatttatggttttagaagaaattaaataaggatgttgtattgtattttttaattgtatgggtagttttaaataaatggagaaagtattttttagaagttatattagtaggaaaaaattttattaagtatttatatagtaaatttttataattttataaaagatttttgattttatttgaagtatatatgagggaaagagtttttttagtaggtgtttttgttgtttatagaagtaaattaaaggatttaaaattggaggtaagttaggatgttaaaaagggggaagagaaatgataaagaattatttataaattttatgtttattttaagatatttgtttaatgatttttatataataagtattttagggaaaattattatttttttaagataaaagtataattttaaaagttgtagtttttaattatagtaatattttttatttttagtaatatgttttaatattttggattgttggatgttaaaagataa

SEQ ID NO: 353 - DNA, 2457 bp, Artificial Sequence
  chemically treated genomic DNA (Homo sapiens)
ttgttttttgatatttagtagtttaaggtattgagatatattattggaagtaagaaatattattataattgagaattatagtttttaagattgtatttttattttaaaagggtggtagttttttttaaaatatttattatgtaagggttattagataaatgttttgaagtagatatggaatttatgaatggttttttattattttttttttttttttttggtattttggtttgtttttagttttaggttttttagtttgtttttgtaagtaatgggaatatttgttgagggggtttttttttttatgtatattttaagtaagattaagaattttttgtgaaattatagaaatttattatgtaaatgtttgatggaatttttttttgttagtgtagtttttgaaaggtgttttttttatttatttaaaattatttatgtaattaaaaggtataatgtagtatttttgtttgattttttttagggttgtaagttttgttttttttttagatgtttatttgtgtgttgtggtaggaattaatttaattgaagtgagtttaatgttttttaaagtgattgaaggtttttttattttaattattgtttgttttaattttggattgttataagtgatataagttataatttgagtagttattgtttttttgagatagatttttgagtttaattgattaatattatagttagtaagtggaagagttagaattttaattattatttgttatattattttataaatgttaaataaggatatattattatatattgagatttttttgtttttattatgggaattaagagtattttttagattgaaattttttatttttaattttgttattggtaagttgggtaatttaggggttatatataattatttatttttttatttgtaaagttggataatggtatttttaaaggttaagatttaaagagatgatgtattataagtatttagtatatgttaggtattattttaaatattggaaagttagttagttattattttttaatttattttggaagggttttaattttttttagaattatatttatttaagaatttgttttattaaagaataaattttggttaggtgtggtggtttatgtttgtaattttagtattttgggaggttgaggtgggtggattatgaggttaggagattgagattattttgtttaatatggggaaattttgtttttattaaaattataaaaaattagttaggtgtggtggtgggtgtttgtaattttagttatttgggaggttgaggtaggagaatggtgtgaatttgggaggtggagtttgtggtgaggggagattgtgttattgtattttagtttgggtaatagagtgagattttgttttaaaaaataaataaataaataaataaataaataaataaatttttttaagaaaaaattttagtgatattaatataatttttaaagatttgataatttttttattttttatagtattttttttttggaaattttataaggttttataggattttatttatttataaaaattttatttatgttagtagatgaaattattttatgttaatttagtatttaaatgttatgtttttaatttataaagattaattttggggaggttaaagtgaatgagtagaaaaaaggtaggatttagagaattttaagtagtaaggtaaagtggattatagaatatttttggtgtaggttaggtgtagtggtttatgtttgtaattttaatattttgggaggttgaggtgggtggattatttgaggttaggagtttatggttagtttgattaatatagtgaaattttatttttagtaaaaatataaaattagttgggtgtggtggtgtatatgtttgtaattttagttatttaggaggttgaggtggtagaattatttgaatttgggaggtagaggatgtagtgagttgagattgtgttattgtattttagtttgggtaataagagtgaaattttatttaaaaaagaaaaaaaaaaatagaatgttttttatgtagtgattggaggtaagttagttagttgtttttaagatttggttgttgaagttagggtttaattttggtgtttagtaatataaatttgtttaggtttttaagtttttttagaaataggttaggtatggtggtttatatttataattttagtattttgggaggttgaggttagtagattgtttggtttaagattagtttggataatatggtaaatttgtttttttatgaaaagtaaaaaaaaatagttaggtatggtggtgtgtattggtggttatagttatttaggaagttgaggtgggaggattgtttgaggttagggggtagaggttgtagttagttaagattgtagtattgtattttagattgggtgaaaaagtaagattgtttaaaaaaaaaaaggttttgtatataag

SEQ ID NO: 354 - DNA, 2501 bp, Artificial Sequence
  chemically treated genomic DNA (Homo sapiens)
aattaattaggtatggtggcgtgtatttgtagttttagttatttgggaggttgaggtaggagaattgtttgattttgggaggtggaggttgtagtgagttattattgtattattgtattcgggtttgggtgatagaatgaaattttgttttaaaaataaattaattaatttaattaaaattaaaattaataaattttaagtttattagtttttacgtaggttttatgtaatgtttattttgggatttgtttttttaggattttattgttatgttttaagaagtttaagttatatcgagaggttatggtaagtatttcggttggtagttttagttgaggttttagtttatattcgatattagttgttacgtatgttaagtaagttatcgtagaagttgagtttgtttaaatatttagattattttagtttcgatttttatttatatggaagattttacgtgagaattattaattaaatttagtttatttgtagaattataagagataataaatttttgttttcggtcgggtatgatggtttatatttgtaattttagtattttagaattcgaggcgggtagattatttgaggttaggagtttaagattagtttgattagtatggagaaattcgtttttattaaaaatataaaattagttgggcgtagtggtatatgtttgtaattttagttatttaggaggttgagataggagaattatttgaattcgggaggcggaagttgtagtgagtagagattatgatgttattttattttagtttgggtaatagagcgagattttgttttaaaaaaaaaagaatgtataatataatatagaatgtgttgtatagaatataatatatttgttttttgaaaataggtgtattgtttgttttggtttattttgtattgttataatagaatattatagattggtatttaaaataaaatagatatttattggtttattattttggaggttaggaagtttaagttggagggggtaatatttggagaaggtttttttgttgtattattttttggtggaagagtaaagagagggagagaaataaaaggtggggggataaatttatttttttataaggaattcgtttttgtgataatagtacgaatttatttattatagtagagtttttatggtttaattatttgttaattattattgttttggagataaagtttttaatatatgaattttggggaatatatttaaattatagtattgtttatggtttgtattttttttttttttttttttttttttttttgagatatagttttgttttgttgtttaggttggagtttagtggtttaattttagtttattataatttttattttttaggtttaagtaattttttagcgttagtttttcgagtagttgggaatataggtatgtattattatatttagttaaattttttgtattttttggtagagacggggttttattatgttgattaggttggtttcgaatttttggttttaagggatttgtttgttttggttttttaacgtgttggaattataggtgtgagttatcgtgttcggtttaataaggaattttttaaataaagttttgcggggtcgattagattaatttatattttttgagtagattttggtataatttattatttgtagtattgaatgttaaggtttgttttttattttgaaattatatttttttttttttattggaattgaaattttatttttttatgaaatgatagtgatggtggatggtatttgttttttttaatatttttatttgataaaataaaagttagtaatttatttcgatttttaattttttgttggtgtttgaaattttaaaattgagatttaaagtatagttttggttttggagagatttttaggagagttagagtttagaagggagtaggatttaggaggtttttattttttagtattttagttgagttagtcgggttatggaatattattgagtaattaaaatattattaatagataaaaaaagtttattgaatataaaatttaaaggtattaatagttttgggtttaagagatttatggtaggaagttaagagttttgttttagggtcggtttgggtagttttggaagaagttattgtatatgatagtgatgagtgttaggaaaatagtatatttttggaagtttatttgttggttattgtttttatttaggttgtttattagtttttttagtttttttttatttatttttttttgaaagtgataggaaatatatttattattaagttagttttaattttagttttattaaatatttagatttttatatatttaggttggtttttagttttttttttttattgggtagttgggtataaggtgggtaggaggttttgggagttattaagagggtttagtgagtaaggagagagatagatatttattggtgagtatttttagtgtgttttttttttggatatagggaggatattggatgttttttt

SEQ ID NO: 355 - DNA, 2501 bp, Artificial Sequence
  chemically treated genomic DNA (Homo sapiens)
agaggagtatttagtgttttttttgtgtttaggaggagggtatattggagatgtttattaatgagtatttgtttttttttttatttattgggtttttttggtagtttttagggttttttgtttattttatatttagttgtttagtggggagggagagttgggaattaatttgaatgtgtgagggtttgggtgtttggtggagttggggttggggttggtttggtgatgagtgtattttttgttatttttaggagaaagtggatgaggaggggttgaagaagttgatgggtagtttggatgagaatagtgattagtaggtggatttttaggagtatgttgtttttttggtatttattattgttatgtgtaatgattttttttagggttgtttagatcgattttgaagtagaatttttgattttttgttatggattttttgggtttaggattgttgatgtttttgagttttgtatttaataaattttttttgtttgttgataatattttaattgtttagtgatgttttataattcggttggtttagttggagtgttgggagatgagggttttttggattttgtttttttttgggttttgatttttttggaaatttttttaaggttagagttatgttttaggttttaattttggaattttaaatattagtaaaaaattggaaatcgagataggttgttgatttttattttgttaaataaagatattaaaaaaggtaaatattatttattattattattattttataaaaagataaaattttaattttaataaaggaggaaaggtataattttagaataaaggatagattttaatatttaatattgtaagtaatgagttgtattaggatttatttaagagatatgaattagtttaatcgatttcgtaaagttttatttaaaagattttttgttagatcgagtacggtggtttatatttgtaattttagtacgttgggaggttaaggtaggtagattttttgaggttaggagttcgagattagtttggttaatatggtgaaatttcgtttttattaaaaaatataaaaaatttagttgggtgtggtggtatatgtttgtatttttagttattcgggaggttgacgttggagaattgtttgaatttgggagatggaggttatagtgagttgagattgggttattggattttagtttgggtaatagagtaagattgtgttttaaaaaaaaaaaaaaaaaaaaaaaaaaagaatataggttataggtagtgttgtggtttgaatgtgttttttaaagtttatgtgttggaaattttatttttaaagtaatagtaattaataggtgattaggttatgagggttttgttgtaatgaatggattcgtgttgttattataggagcgggttttttatagaaggatgaatttgtttttttattttttatttttttttttttttttgtttttttattaggagatgatgtagtaagaaggttttttttaggtgttattttttttagtttagattttttggtttttagaatggtgagttaataaatatttgttttgttttgaatattagtttgtggtattttgttgtagtaatataaaatggattaagataggtagtatatttgtttttagaaaataagtgtattgtattttatataatatattttatattatattgtatatttttttttttttgagatagggtttcgttttgttgtttaggttggagtgaagtggtattataatttttgtttattgtaattttcgtttttcgggtttaagtgatttttttattttagttttttgagtagttgggattataggtatgtgttattacgtttagttaattttgtatttttagtagagacgggtttttttatgttggttaggttggttttgaatttttaattttaggtgatttgttcgtttcgggttttaaagtgttgggattatagatgtgagttattatgttcggtcgagagtaaaaatttattattttttatggttttgtaggtagattgggtttagttgatggtttttacgtggggttttttatgtaggtggaaatcggagttagagtaatttgaatgtttgaataaatttaatttttacggtagtttgtttaatatgcgtggtaattgatatcgaatgtgagttgggattttagttagaattgttagtcggagtgtttattatggtttttcgatgtggtttgagttttttagagtatggtagtagggttttgagaggataaattttaaagtgagtattgtatgaggtttacgtggaagttggtaggtttaagatttattaattttaattttaattaaattaattaatttatttttgagatagggttttattttgttatttaggttcgggtgtagtggtgtaataatggtttattgtagtttttattttttagggttaagtaatttttttgttttagttttttaagtggttgggattataggtatacgttattatatttggttaatt

SEQ ID NO: 356 - DNA, 2501 bp, Artificial Sequence
  chemically treated genomic DNA (Homo sapiens)
tgtattaatttgtgtaaaatagtatattagatgatggggattaaaagtcgaatattaattttagtattttgggagattaagggaggtagattatttgaggtcgggagttcgagattagtttggttaatagggtgaaattttatttttattaaaaatataaaaatgagtcgggtagtggtagtgtatgtttgtaattttagttatttgggaggttgaggtaggagaatcgtttgaatttgggaggtagaagttgtagtgagttaagattgcgttattgtattttagtttgggtgatagagtgagattttgttttaaaaaaaagaaaaagttaaatatttggagtttttgttttttagggaagtacggtttagaaagtttttaattaggaaatttaggagattttgtgttattaaattttatttagaaaattggttgtttatgtagagaatttatgttgattatattttgaatttttttgggtattttatatattttgattaattgtttttaaaggttgttaattagtggtgtatgttagtaatatcgagggagtttttttaaaattacgagatttggagttagttttgatttgaattataatttttataggtggagtgtaggtgtgtatattttaaaaggtttttagatgattcgattaagaaatattgttttaatttattaatatagtttggtaattttaatttttgatatttaattattttttaatttgttttttatattttagttttttagaatttgatgttttgtttaaaatatatagttatttttattaggatattatttagttttgagattttgggttttttaattataggtatagtaatggttggttataagttttgttaatatattgagaaaattttagtattagttttatatatagatgatgggaaattatgttttttgttttttgaatgttatagagttaagttggtattttggataagtaattttttttttttatttatttttttatttatttgaggcgaagttttttttttgtcgtttaggttggagtgtagtggtgcgatttcggtttattgtaatttttgtttttcgggtttaaatgatttttttgttttagtttttcgagtagttgggattataggtatttatttttatattcggttaatttttttgtatttttagtagagatggggttttattatgttggttaggttggttttaaatttttgattttaggtgatttatatatttcggttttttaaagtgttggattataggcgtgagttattgagtttggttagtaatttttatttataggtttttttttttttttttttttttttttttttttgagatagggttttgttttgttatttaggttggagtgtagtggtataattagttgattgtaaatttgaattttttggtttaggatttttttgttttagttttttaagtagttaggattatagatatgtgttattatatttggttaatttttttattttttgtagagatagggttttattaagttttttaggttggttttaaatttttgggtttaagcgatttttttattttagttttttaaaatgttaggattataggtatgagttattatatttggttataggtgttttttttggttgaggttagtttaaggattgttgggggtagagtgaagagattgttgtggagttaattttaaagaagattattatgtatagttgtataagatgtgtattgtataaaggtattaggttaaggaggtaattgggagttgatattaagtttgtatattatttatatagttatgggattgtggtttggggaaattttgtatatattaagtgttgtggtggttttgttttatagtttttttaatttttattttttaaagttttattaagtttagagatgtagttttataagaaattttagggtgtagtttatttttgttatttttttttttttatgtattttaatttttttttatataagtattagggagatttgttattagaaaaattatattttattgattatttttatttaaaattataaaaatataaataaaaatagtgaaatataaatatttagtgtataggagtggtttttattttatttagtgaggattggatgaattaggttaaaaggaagggataattggttaagaaagggatatttatgtgaaagtgaaattgagatagtgttggttataggttatgttgtagaataatatatttttaggtattgttacgtgggggatttaagaggttttaggagtgatttataatttttttagaaagattattttgtgtggtattatagtttatatagtttaaggaaatatttagatttaataattagatattagtttttatttatatttatatttatagtttatatataagtgtgtaaatatatatatatatatatattttttgatatatttatggaatattagagttttgttttgaagtcgttagtgtttttgttttttaaatcgttgt

SEQ ID NO: 357 - DNA, 2501 bp, Artificial Sequence
  chemically treated genomic DNA (Homo sapiens)
gtagcggtttggggagtagagatattaacgattttagggtagggttttgatattttatgaatgtattaggaaatatatatgtgtgtgtatgtttgtatatttgtgtgtgggttgtgagtgtaagtgtgagtaagagttggtgtttgattgttaagtttaaatatttttttaaattgtgtggattgtgatgttatatagagtggtttttttggagaggttataggttatttttggggttttttgggttttttacgtgatagtgtttgggaatgtattattttgtagtatgatttgtgattagtattgttttagttttatttttatatagatgttttttttttggttagttattttttttttttagtttagtttatttaatttttattgggtggggtgaggattatttttgtatattgaatatttatattttattatttttatttatatttttgtaattttaaataaaagtgattaataaaatgtgatttttttgatgataaatttttttggtgtttgtatgggaaggagttggagtatataaaaaggagaaaataataaaggtggattgtattttagagttttttatgggattgtatttttggatttaatggagttttgggaggtagaggttaggagagttgtagggtagggttattatagtatttaatgtatataaagtttttttaaattataattttatggttgtgtaagtagtgtataggtttagtgttagtttttaattgtttttttaatttgatgtttttgtgtagtgtatattttgtatagttgtatatggtggttttttttagggttaattttataatagtttttttattttgtttttaataatttttgagttgattttaattaagaagaatatttgtggttaggtgtagtggtttatgtttgtaattttaatattttgagaggttgaggtgggagaatcgtttgagtttaggagtttgagattagtttgggaaatttagtgagattttgtttttgtaaaaaataaaaaaattagttaggtgtggtagtatatgtttgtagttttagttatttgggaggttgaggtaggaggattttaagttaaggagtttaagtttatagttagttgattgtgttattgtattttagtttaggtgatagagtaagattttgttttaaaaaaaaaaaaaaaaaaaaaagaagaagaagatttgtaagtgaaaattgttggttaggtttagtggtttacgtttgtaatttagtattttgggaagtcgaggtgtgtggattatttgaggttaggagtttgagattagtttgattaatatagtgaaattttatttttattaaaaatataaaaaaattagtcgggtgtgggggtgggtgtttgtaattttagttattcgggaggttgaggtaggagaattatttgaattcgggaggtagaggttgtagtgagtcgagatcgtattattgtattttagtttgggcgatagagggaagatttcgttttaaataaataaaaaaataaataaagaaagaaaattgtttatttagaatgttagtttgattttgtggtatttaggaaataaaaaatataattttttattatttgtgtgtgggattgatgttggaatttttttagtgtgttaatagagtttgtgattagttattgttatgtttatgattagggggtttagaattttaaagttggatgatgttttaatgggggtgattatatattttgaataaaatattaagttttgaaaagttggggtgtagaaggtaggttgggagataattgggtattaaaaattagaattgttaagttgtgttaatgggttggggtagtgttttttaatcgagttatttgaggattttttaaaatatgtatatttatattttatttgtagagattgtgatttaggttagggttggttttaggtttcgtggttttagaaaagttttttcggtgttattaatatgtattattgattgatagtttttggggataattggttagaatatatgaagtgtttagaaaaatttaagatatggttagtatgagttttttgtatgaatagttagttttttgagtggggtttggtggtataaggttttttggattttttggttaaaggttttttggatcgtgtttttttagagggtaagaattttaagtatttggtttttttttttttttgaggtagggttttattttgttatttaggttggagtgtagtggcgtaattttagtttattgtagtttttgttttttaggtttaagcgatttttttgttttagttttttaagtagttgggattataagtatgtattattattattcggtttatttttgtgtttttggtagagatggggttttattttgttggttaggttggtttcgaattttcgattttaggtgatttgttttttttggttttttaaagtattgggattagtattcggtttttgatttttattatttagtgtgttgttttatataggttgatgta

SEQ ID NO: 358 - DNA, 2501 bp, Artificial Sequence
  chemically treated genomic DNA (Homo sapiens)
gatgttaaaaatattttttttttgggatgatatttgtggggaaaatatattgaaagtttttttaataagatttaatgtaaatgaattattgatatataaaggtgttatttaatatttaaagttagtatttttgtgttgtatgggtattagtaaaattatatgtaaatgttttgtatttatttagtatacgttgagtgtataaatattaaaatgtttatttattaggtattgtaatttatatttattattggattgtaatttttttgagttatatgtttttttttagttttaaatttttataaggtttattagtatattttttttgtgttaatattaggtatttaattaatatttgttgaatgaaattagaaatgaagaaagtttttatgttgaggtttatagtataaaataatttaaggttatataaatataagaaataattgttttgtggaattttgtttagggagagaaataatattttatttatttagtttaaaaatttagaataaggaatttaaagtattgtttttaagatatataaaatatatttttatttttttatgttatagttagtaaagggagagattttataaagtaggaagtaaaggtggaaaatttaaaagtaatgaagataattgatggagataaagtatgggagaagaaagtgataaagttatgggtatagaaatatgtagaaatgtaattaaagaatgatcgaaatttatagtaatattaagatagagagaaaatgttatttaatttttagttagtaaatattattgattattttatatggtttttagatttttaggagagttataattgtaaaataatatgttattgtaatttaaatgtgtataaaatggtaggtaaattttaggagaaggtaaattattgtttggaagatttagggaagattttatagaaatgatatttggttgagtttcgaaggttgaaatatgtatggaatttgtgttaaagggggaaaattttggaagaaattttatggtaaaaagatttgtatggttgaaatataatatgaatttatgatagtggaggataaagaggagaaaggtatgtgaattgatattttttttttttttttttttttttttttttttttttgatttgaaaagatgttaataagttttgatttaaaggagtaattggtaggaaagatattttattatttttaaaggtgagagaattgagaattagtaagagtgattaatttttagtatgttatagttggtaaggagtatagttaggttataattttttgattttttatgtttattcgtaatattttattagaggataattttttttttaaaaaaggttattttaaaaatttataaaatttataatattatttgtataatgatatgaatttatttattaattttttaagagatttgtgtttttaatttggaaaatggttttaatatatgagttgttttgtttagtttgaagaatattaatttattttagtggttttaaattttttttatattttttgtattaaaaatatttttgaaaatttgaggaaagttatgaattttttttttatataaatatatatagataaaattttgtatattattttaaaggtttatttttggaaatataattgatataaagggagttatttagaaataatatataatagttttgtgttattatatgtaagatttttttttttaagtcgatgatttgttagatgtaaaagttaaaaatttttatttatatggtatgaaataatatggataagatagtttattttaataattttagtatttttttaattttgtaaattttttaagaaaatatgggtaaataaaatagttaaatattttaattatattttataaaagaaaataattagaattttataattttttttttaaatttatatattatgatgttataaatgtaaggtttttagaagaatattataaaaatttaagattttataattttgattaaaataaaaagatatattataaaatttaattttttaaaagaaaaagatgatatttattttttatgaaagagaaggggttttattatttttgttaatattttgggtaattgtgtagtaataattttagatattatttttggaaatttaatatttagtgttcgggattggataaatgtatttaagtagtatagatgaagttgtttgataagttgttggtttaataaatgagtagaaaatatgtaataaaaataataaatttatatgttatttaaatatggtaatttatttttttaattatttataatataaatattttttaaggtgttttttttttattatagtgaaaataatttttattattttttagaataatatgtaaaatgttatatatttatgatagaatattttgatattatggaaagatttatttaaagaaatgaaagttatttataattttataggataagttgtgtgaatattttggtgtattatttaagtttttttttttttttatata

SEQ ID NO: 359 - DNA, 2501 bp, Artificial Sequence
  chemically treated genomic DNA (Homo sapiens)
tgtataaaaagaaaaaaaaatttgagtaatatattaaaatgtttatatagtttattttgtagaattgtgaataatttttatttttttaaataaatttttttataatattagaatgttttattatgagtatataatattttatatattattttagaaaatggtgggagttatttttattatggtaagaaaaaaatattttgagaagtatttatattataaatagttagaaaaataaattgttatgtttgaatagtatatgaatttattatttttattatatgttttttatttatttgttaaattaatagtttgttaaataattttatttgtattgtttgaatatatttatttagtttcgggtattgagtgttgaatttttagaaatgatgtttgaagttattgttgtataattatttaagatattggtagggatggtgaaatttttttttttttataaaaagtgaatgttattttttttttttaaagaattaaattttgtggtatgtttttttgttttggttaggattatgaggttttgagtttttataatgtttttttgaaagttttatatttataatattatagtgtgtaaatttaaaagaaaaattgtgaggttttaattatttttttttataaagtataattagaatgtttaattgttttgtttatttatatttttttgaagaatttataagattgaaaaagtattaaaattgttaaagtaaattattttatttatattattttatattatgtaggtgaggatttttaatttttgtatttaataaattatcgatttaagagaaaaaattttatatgtaataatataaagttattatatgttatttttaggtaattttttttgtgttaattatatttttaaaaatgaatttttaaaatggtatgtaaaattttgtttatatatatttgtgtgaggaggaaatttataattttttttagatttttaaaagtatttttaatgtaaaaaatgtagaaagagtttaaaattattaaaatagattgatgttttttaaattaggtaaaataatttatatgttaagattattttttagattggaaatataaattttttaggaagttaataagtagatttatattattatgtaaatagtattgtgggttttgtaggtttttaaaataattttttttggggagagaattgttttttaatgaggtattgcgagtggatataagaaattagaagattatggtttaattgtattttttattaattgtggtatgttgaaagttagttatttttattgatttttaatttttttatttttgaaagtagtaaaatattttttttgttaattgtttttttgggttagagtttattaatatttttttaaattaaaggaaagaagaaagggagaggaggaggagggaggtattaatttatatattttttttttttttattttttattattatgaatttatattatgttttagttatgtaaatttttttattatgaaattttttttagaattttttttttttgatataaattttatgtatgttttaattttcgagatttagttaaatgttatttttgtaaaattttttttgagttttttaagtagtaatttgtttttttttagagtttatttgttattttgtgtatatttgagttatagtagtatgttattttataattgtgatttttttgggagtttgggagttatataaagtggttaatagtgtttgttgattgagagttgaatgatattttttttttgttttggtattattgtagatttcgattattttttggttatatttttgtatatttttgtatttatgattttattattttttttttttatgttttatttttattaattatttttattatttttaaattttttatttttgttttttattttgtgagatttttttttttattgattataatatagaagaatagaagtgtattttatgtgttttaaggataatattttagattttttgttttaagtttttaaattgaatgaatggaatattatttttttttttaagtaaaattttataaaataattattttttatgtttatgtagttttaaattgttttgtattgtaaattttagtataaaaattttttttatttttaattttatttaataaatattgattgaatatttggtattagtataagaaaaatgtgttaataagttttatgagaatttggagttgaagaaagatatataatttaggaaagttatagtttagtagtaggtataaattatagtgtttgataaataggtattttaatatttgtatatttaacgtatattaggtaggtgtaaaatatttatatataattttattgatatttatgtagtataaaggtattaattttaaatattaaataatatttttatgtgttagtaatttatttgtattaaattttattgaaaaggtttttaatatattttttttataaatgttattttaagaaaaaagtatttttaatatt

SEQ ID NO: 360 - DNA, 2501 bp, Artificial Sequence
  chemically treated genomic DNA (Homo sapiens)
aattaattaggtatggtggtgtgtatttgtagttttagttatttgggaggttgaggtaggagaattgtttgattttgggaggtggaggttgtagtgagttattattgtattattgtatttgggtttgggtgatagaatgaaattttgttttaaaaataaattaattaatttaattaaaattaaaattaataaattttaagtttattagtttttatgtaggttttatgtaatgtttattttgggatttgtttttttaggattttattgttatgttttaagaagtttaagttatattgagaggttatggtaagtattttggttggtagttttagttgaggttttagtttatatttgatattagttgttatgtatgttaagtaagttattgtagaagttgagtttgtttaaatatttagattattttagttttgatttttatttatatggaagattttatgtgagaattattaattaaatttagtttatttgtagaattataagagataataaatttttgtttttggttgggtatgatggtttatatttgtaattttagtattttagaatttgaggtgggtagattatttgaggttaggagtttaagattagtttgattagtatggagaaatttgtttttattaaaaatataaaattagttgggtgtagtggtatatgtttgtaattttagttatttaggaggttgagataggagaattatttgaatttgggaggtggaagttgtagtgagtagagattatgatgttattttattttagtttgggtaatagagtgagattttgttttaaaaaaaaaagaatgtataatataatatagaatgtgttgtatagaatataatatatttgttttttgaaaataggtgtattgtttgttttggtttattttgtattgttataatagaatattatagattggtatttaaaataaaatagatatttattggtttattattttggaggttaggaagtttaagttggagggggtaatatttggagaaggtttttttgttgtattattttttggtggaagagtaaagagagggagagaaataaaaggtggggggataaatttatttttttataaggaatttgtttttgtgataatagtatgaatttatttattatagtagagtttttatggtttaattatttgttaattattattgttttggagataaagtttttaatatatgaattttggggaatatatttaaattatagtattgtttatggtttgtattttttttttttttttttttttttttttttgagatatagttttgttttgttgtttaggttggagtttagtggtttaattttagtttattataatttttattttttaggtttaagtaattttttagtgttagttttttgagtagttgggaatataggtatgtattattatatttagttaaattttttgtattttttggtagagatggggttttattatgttgattaggttggttttgaatttttggttttaagggatttgtttgttttggttttttaatgtgttggaattataggtgtgagttattgtgtttggtttaataaggaattttttaaataaagttttgtggggttgattagattaatttatattttttgagtagattttggtataatttattatttgtagtattgaatgttaaggtttgttttttattttgaaattatatttttttttttttattggaattgaaattttatttttttatgaaatgatagtgatggtggatggtatttgttttttttaatatttttatttgataaaataaaagttagtaatttattttgatttttaattttttgttggtgtttgaaattttaaaattgagatttaaagtatagttttggttttggagagatttttaggagagttagagtttagaagggagtaggatttaggaggtttttattttttagtattttagttgagttagttgggttatggaatattattgagtaattaaaatattattaatagataaaaaaagtttattgaatataaaatttaaaggtattaatagttttgggtttaagagatttatggtaggaagttaagagttttgttttagggttggtttgggtagttttggaagaagttattgtatatgatagtgatgagtgttaggaaaatagtatatttttggaagtttatttgttggttattgtttttatttaggttgtttattagtttttttagtttttttttatttatttttttttgaaagtgataggaaatatatttattattaagttagttttaattttagttttattaaatatttagatttttatatatttaggttggtttttagttttttttttttattgggtagttgggtataaggtgggtaggaggttttgggagttattaagagggtttagtgagtaaggagagagatagatatttattggtgagtatttttagtgtgttttttttttggatatagggaggatattggatgttttttt

SEQ ID NO: 361 - DNA, 2501 bp, Artificial Sequence
  chemically treated genomic DNA (Homo sapiens)
agaggagtatttagtgttttttttgtgtttaggaggagggtatattggagatgtttattaatgagtatttgtttttttttttatttattgggtttttttggtagtttttagggttttttgtttattttatatttagttgtttagtggggagggagagttgggaattaatttgaatgtgtgagggtttgggtgtttggtggagttggggttggggttggtttggtgatgagtgtattttttgttatttttaggagaaagtggatgaggaggggttgaagaagttgatgggtagtttggatgagaatagtgattagtaggtggatttttaggagtatgttgtttttttggtatttattattgttatgtgtaatgattttttttagggttgtttagattgattttgaagtagaatttttgattttttgttatggattttttgggtttaggattgttgatgtttttgagttttgtatttaataaattttttttgtttgttgataatattttaattgtttagtgatgttttataatttggttggtttagttggagtgttgggagatgagggttttttggattttgtttttttttgggttttgatttttttggaaatttttttaaggttagagttatgttttaggttttaattttggaattttaaatattagtaaaaaattggaaattgagataggttgttgatttttattttgttaaataaagatattaaaaaaggtaaatattatttattattattattattttataaaaagataaaattttaattttaataaaggaggaaaggtataattttagaataaaggatagattttaatatttaatattgtaagtaatgagttgtattaggatttatttaagagatatgaattagtttaattgattttgtaaagttttatttaaaagattttttgttagattgagtatggtggtttatatttgtaattttagtatgttgggaggttaaggtaggtagattttttgaggttaggagtttgagattagtttggttaatatggtgaaattttgtttttattaaaaaatataaaaaatttagttgggtgtggtggtatatgtttgtatttttagttatttgggaggttgatgttggagaattgtttgaatttgggagatggaggttatagtgagttgagattgggttattggattttagtttgggtaatagagtaagattgtgttttaaaaaaaaaaaaaaaaaaaaaaaaaaagaatataggttataggtagtgttgtggtttgaatgtgttttttaaagtttatgtgttggaaattttatttttaaagtaatagtaattaataggtgattaggttatgagggttttgttgtaatgaatggatttgtgttgttattataggagtgggttttttatagaaggatgaatttgtttttttattttttatttttttttttttttttgtttttttattaggagatgatgtagtaagaaggttttttttaggtgttattttttttagtttagattttttggtttttagaatggtgagttaataaatatttgttttgttttgaatattagtttgtggtattttgttgtagtaatataaaatggattaagataggtagtatatttgtttttagaaaataagtgtattgtattttatataatatattttatattatattgtatatttttttttttttgagatagggttttgttttgttgtttaggttggagtgaagtggtattataatttttgtttattgtaatttttgttttttgggtttaagtgatttttttattttagttttttgagtagttgggattataggtatgtgttattatgtttagttaattttgtatttttagtagagatgggtttttttatgttggttaggttggttttgaatttttaattttaggtgatttgtttgttttgggttttaaagtgttgggattatagatgtgagttattatgtttggttgagagtaaaaatttattattttttatggttttgtaggtagattgggtttagttgatggtttttatgtggggttttttatgtaggtggaaattggagttagagtaatttgaatgtttgaataaatttaatttttatggtagtttgtttaatatgtgtggtaattgatattgaatgtgagttgggattttagttagaattgttagttggagtgtttattatggttttttgatgtggtttgagttttttagagtatggtagtagggttttgagaggataaattttaaagtgagtattgtatgaggtttatgtggaagttggtaggtttaagatttattaattttaattttaattaaattaattaatttatttttgagatagggttttattttgttatttaggtttgggtgtagtggtgtaataatggtttattgtagtttttattttttagggttaagtaatttttttgttttagttttttaagtggttgggattataggtatatgttattatatttggttaatt

SEQ ID NO: 362 - DNA, 2501 bp, Artificial Sequence
  chemically treated genomic DNA (Homo sapiens)
tgtattaatttgtgtaaaatagtatattagatgatggggattaaaagttgaatattaattttagtattttgggagattaagggaggtagattatttgaggttgggagtttgagattagtttggttaatagggtgaaattttatttttattaaaaatataaaaatgagttgggtagtggtagtgtatgtttgtaattttagttatttgggaggttgaggtaggagaattgtttgaatttgggaggtagaagttgtagtgagttaagattgtgttattgtattttagtttgggtgatagagtgagattttgttttaaaaaaaagaaaaagttaaatatttggagtttttgttttttagggaagtatggtttagaaagtttttaattaggaaatttaggagattttgtgttattaaattttatttagaaaattggttgtttatgtagagaatttatgttgattatattttgaatttttttgggtattttatatattttgattaattgtttttaaaggttgttaattagtggtgtatgttagtaatattgagggagtttttttaaaattatgagatttggagttagttttgatttgaattataatttttataggtggagtgtaggtgtgtatattttaaaaggtttttagatgatttgattaagaaatattgttttaatttattaatatagtttggtaattttaatttttgatatttaattattttttaatttgttttttatattttagttttttagaatttgatgttttgtttaaaatatatagttatttttattaggatattatttagttttgagattttgggttttttaattataggtatagtaatggttggttataagttttgttaatatattgagaaaattttagtattagttttatatatagatgatgggaaattatgttttttgttttttgaatgttatagagttaagttggtattttggataagtaattttttttttttatttatttttttatttatttgaggtgaagttttttttttgttgtttaggttggagtgtagtggtgtgattttggtttattgtaatttttgttttttgggtttaaatgatttttttgttttagttttttgagtagttgggattataggtatttatttttatatttggttaatttttttgtatttttagtagagatggggttttattatgttggttaggttggttttaaatttttgattttaggtgatttatatattttggttttttaaagtgttggattataggtgtgagttattgagtttggttagtaatttttatttataggtttttttttttttttttttttttttttttttttgagatagggttttgttttgttatttaggttggagtgtagtggtataattagttgattgtaaatttgaattttttggtttaggatttttttgttttagttttttaagtagttaggattatagatatgtgttattatatttggttaatttttttattttttgtagagatagggttttattaagttttttaggttggttttaaatttttgggtttaagtgatttttttattttagttttttaaaatgttaggattataggtatgagttattatatttggttataggtgttttttttggttgaggttagtttaaggattgttgggggtagagtgaagagattgttgtggagttaattttaaagaagattattatgtatagttgtataagatgtgtattgtataaaggtattaggttaaggaggtaattgggagttgatattaagtttgtatattatttatatagttatgggattgtggtttggggaaattttgtatatattaagtgttgtggtggttttgttttatagtttttttaatttttattttttaaagttttattaagtttagagatgtagttttataagaaattttagggtgtagtttatttttgttatttttttttttttatgtattttaatttttttttatataagtattagggagatttgttattagaaaaattatattttattgattatttttatttaaaattataaaaatataaataaaaatagtgaaatataaatatttagtgtataggagtggtttttattttatttagtgaggattggatgaattaggttaaaaggaagggataattggttaagaaagggatatttatgtgaaagtgaaattgagatagtgttggttataggttatgttgtagaataatatatttttaggtattgttatgtgggggatttaagaggttttaggagtgatttataatttttttagaaagattattttgtgtggtattatagtttatatagtttaaggaaatatttagatttaataattagatattagtttttatttatatttatatttatagtttatatataagtgtgtaaatatatatatatatatatattttttgatatatttatggaatattagagttttgttttgaagttgttagtgtttttgttttttaaattgttgt

SEQ ID NO: 363 - DNA, 2501 bp, Artificial Sequence
  chemically treated genomic DNA (Homo sapiens)
gtagtggtttggggagtagagatattaatgattttagggtagggttttgatattttatgaatgtattaggaaatatatatgtgtgtgtatgtttgtatatttgtgtgtgggttgtgagtgtaagtgtgagtaagagttggtgtttgattgttaagtttaaatatttttttaaattgtgtggattgtgatgttatatagagtggtttttttggagaggttataggttatttttggggttttttgggttttttatgtgatagtgtttgggaatgtattattttgtagtatgatttgtgattagtattgttttagttttatttttatatagatgttttttttttggttagttattttttttttttagtttagtttatttaatttttattgggtggggtgaggattatttttgtatattgaatatttatattttattatttttatttatatttttgtaattttaaataaaagtgattaataaaatgtgatttttttgatgataaatttttttggtgtttgtatgggaaggagttggagtatataaaaaggagaaaataataaaggtggattgtattttagagttttttatgggattgtatttttggatttaatggagttttgggaggtagaggttaggagagttgtagggtagggttattatagtatttaatgtatataaagtttttttaaattataattttatggttgtgtaagtagtgtataggtttagtgttagtttttaattgtttttttaatttgatgtttttgtgtagtgtatattttgtatagttgtatatggtggttttttttagggttaattttataatagtttttttattttgtttttaataatttttgagttgattttaattaagaagaatatttgtggttaggtgtagtggtttatgtttgtaattttaatattttgagaggttgaggtgggagaattgtttgagtttaggagtttgagattagtttgggaaatttagtgagattttgtttttgtaaaaaataaaaaaattagttaggtgtggtagtatatgtttgtagttttagttatttgggaggttgaggtaggaggattttaagttaaggagtttaagtttatagttagttgattgtgttattgtattttagtttaggtgatagagtaagattttgttttaaaaaaaaaaaaaaaaaaaaaagaagaagaagatttgtaagtgaaaattgttggttaggtttagtggtttatgtttgtaatttagtattttgggaagttgaggtgtgtggattatttgaggttaggagtttgagattagtttgattaatatagtgaaattttatttttattaaaaatataaaaaaattagttgggtgtgggggtgggtgtttgtaattttagttatttgggaggttgaggtaggagaattatttgaatttgggaggtagaggttgtagtgagttgagattgtattattgtattttagtttgggtgatagagggaagattttgttttaaataaataaaaaaataaataaagaaagaaaattgtttatttagaatgttagtttgattttgtggtatttaggaaataaaaaatataattttttattatttgtgtgtgggattgatgttggaatttttttagtgtgttaatagagtttgtgattagttattgttatgtttatgattagggggtttagaattttaaagttggatgatgttttaatgggggtgattatatattttgaataaaatattaagttttgaaaagttggggtgtagaaggtaggttgggagataattgggtattaaaaattagaattgttaagttgtgttaatgggttggggtagtgttttttaattgagttatttgaggattttttaaaatatgtatatttatattttatttgtagagattgtgatttaggttagggttggttttaggttttgtggttttagaaaagtttttttggtgttattaatatgtattattgattgatagtttttggggataattggttagaatatatgaagtgtttagaaaaatttaagatatggttagtatgagttttttgtatgaatagttagttttttgagtggggtttggtggtataaggttttttggattttttggttaaaggttttttggattgtgtttttttagagggtaagaattttaagtatttggtttttttttttttttgaggtagggttttattttgttatttaggttggagtgtagtggtgtaattttagtttattgtagtttttgttttttaggtttaagtgatttttttgttttagttttttaagtagttgggattataagtatgtattattattatttggtttatttttgtgtttttggtagagatggggttttattttgttggttaggttggttttgaatttttgattttaggtgatttgttttttttggttttttaaagtattgggattagtatttggtttttgatttttattatttagtgtgttgttttatataggttgatgta

SEQ ID NO: 364 - DNA, 2501 bp, Artificial Sequence
  chemically treated genomic DNA (Homo sapiens)
gatgttaaaaatattttttttttgggatgatatttgtggggaaaatatattgaaagtttttttaataagatttaatgtaaatgaattattgatatataaaggtgttatttaatatttaaagttagtatttttgtgttgtatgggtattagtaaaattatatgtaaatgttttgtatttatttagtatatgttgagtgtataaatattaaaatgtttatttattaggtattgtaatttatatttattattggattgtaatttttttgagttatatgtttttttttagttttaaatttttataaggtttattagtatattttttttgtgttaatattaggtatttaattaatatttgttgaatgaaattagaaatgaagaaagtttttatgttgaggtttatagtataaaataatttaaggttatataaatataagaaataattgttttgtggaattttgtttagggagagaaataatattttatttatttagtttaaaaatttagaataaggaatttaaagtattgtttttaagatatataaaatatatttttatttttttatgttatagttagtaaagggagagattttataaagtaggaagtaaaggtggaaaatttaaaagtaatgaagataattgatggagataaagtatgggagaagaaagtgataaagttatgggtatagaaatatgtagaaatgtaattaaagaatgattgaaatttatagtaatattaagatagagagaaaatgttatttaatttttagttagtaaatattattgattattttatatggtttttagatttttaggagagttataattgtaaaataatatgttattgtaatttaaatgtgtataaaatggtaggtaaattttaggagaaggtaaattattgtttggaagatttagggaagattttatagaaatgatatttggttgagttttgaaggttgaaatatgtatggaatttgtgttaaagggggaaaattttggaagaaattttatggtaaaaagatttgtatggttgaaatataatatgaatttatgatagtggaggataaagaggagaaaggtatgtgaattgatattttttttttttttttttttttttttttttttttttgatttgaaaagatgttaataagttttgatttaaaggagtaattggtaggaaagatattttattatttttaaaggtgagagaattgagaattagtaagagtgattaatttttagtatgttatagttggtaaggagtatagttaggttataattttttgattttttatgtttatttgtaatattttattagaggataattttttttttaaaaaaggttattttaaaaatttataaaatttataatattatttgtataatgatatgaatttatttattaattttttaagagatttgtgtttttaatttggaaaatggttttaatatatgagttgttttgtttagtttgaagaatattaatttattttagtggttttaaattttttttatattttttgtattaaaaatatttttgaaaatttgaggaaagttatgaattttttttttatataaatatatatagataaaattttgtatattattttaaaggtttatttttggaaatataattgatataaagggagttatttagaaataatatataatagttttgtgttattatatgtaagatttttttttttaagttgatgatttgttagatgtaaaagttaaaaatttttatttatatggtatgaaataatatggataagatagtttattttaataattttagtatttttttaattttgtaaattttttaagaaaatatgggtaaataaaatagttaaatattttaattatattttataaaagaaaataattagaattttataattttttttttaaatttatatattatgatgttataaatgtaaggtttttagaagaatattataaaaatttaagattttataattttgattaaaataaaaagatatattataaaatttaattttttaaaagaaaaagatgatatttattttttatgaaagagaaggggttttattatttttgttaatattttgggtaattgtgtagtaataattttagatattatttttggaaatttaatatttagtgtttgggattggataaatgtatttaagtagtatagatgaagttgtttgataagttgttggtttaataaatgagtagaaaatatgtaataaaaataataaatttatatgttatttaaatatggtaatttatttttttaattatttataatataaatattttttaaggtgttttttttttattatagtgaaaataatttttattattttttagaataatatgtaaaatgttatatatttatgatagaatattttgatattatggaaagatttatttaaagaaatgaaagttatttataattttataggataagttgtgtgaatattttggtgtattatttaagtttttttttttttttatata

SEQ ID NO: 365 - DNA, 2501 bp, Artificial Sequence
  chemically treated genomic DNA (Homo sapiens)
tgtataaaaagaaaaaaaaatttgagtaatatattaaaatgtttatatagtttattttgtagaattgtgaataatttttatttttttaaataaatttttttataatattagaatgttttattatgagtatataatattttatatattattttagaaaatggtgggagttatttttattatggtaagaaaaaaatattttgagaagtatttatattataaatagttagaaaaataaattgttatgtttgaatagtatatgaatttattatttttattatatgttttttatttatttgttaaattaatagtttgttaaataattttatttgtattgtttgaatatatttatttagttttgggtattgagtgttgaatttttagaaatgatgtttgaagttattgttgtataattatttaagatattggtagggatggtgaaatttttttttttttataaaaagtgaatgttattttttttttttaaagaattaaattttgtggtatgtttttttgttttggttaggattatgaggttttgagtttttataatgtttttttgaaagttttatatttataatattatagtgtgtaaatttaaaagaaaaattgtgaggttttaattatttttttttataaagtataattagaatgtttaattgttttgtttatttatatttttttgaagaatttataagattgaaaaagtattaaaattgttaaagtaaattattttatttatattattttatattatgtaggtgaggatttttaatttttgtatttaataaattattgatttaagagaaaaaattttatatgtaataatataaagttattatatgttatttttaggtaattttttttgtgttaattatatttttaaaaatgaatttttaaaatggtatgtaaaattttgtttatatatatttgtgtgaggaggaaatttataattttttttagatttttaaaagtatttttaatgtaaaaaatgtagaaagagtttaaaattattaaaatagattgatgttttttaaattaggtaaaataatttatatgttaagattattttttagattggaaatataaattttttaggaagttaataagtagatttatattattatgtaaatagtattgtgggttttgtaggtttttaaaataattttttttggggagagaattgttttttaatgaggtattgtgagtggatataagaaattagaagattatggtttaattgtattttttattaattgtggtatgttgaaagttagttatttttattgatttttaatttttttatttttgaaagtagtaaaatattttttttgttaattgtttttttgggttagagtttattaatatttttttaaattaaaggaaagaagaaagggagaggaggaggagggaggtattaatttatatattttttttttttttattttttattattatgaatttatattatgttttagttatgtaaatttttttattatgaaattttttttagaattttttttttttgatataaattttatgtatgttttaatttttgagatttagttaaatgttatttttgtaaaattttttttgagttttttaagtagtaatttgtttttttttagagtttatttgttattttgtgtatatttgagttatagtagtatgttattttataattgtgatttttttgggagtttgggagttatataaagtggttaatagtgtttgttgattgagagttgaatgatattttttttttgttttggtattattgtagattttgattattttttggttatatttttgtatatttttgtatttatgattttattattttttttttttatgttttatttttattaattatttttattatttttaaattttttatttttgttttttattttgtgagatttttttttttattgattataatatagaagaatagaagtgtattttatgtgttttaaggataatattttagattttttgttttaagtttttaaattgaatgaatggaatattatttttttttttaagtaaaattttataaaataattattttttatgtttatgtagttttaaattgttttgtattgtaaattttagtataaaaattttttttatttttaattttatttaataaatattgattgaatatttggtattagtataagaaaaatgtgttaataagttttatgagaatttggagttgaagaaagatatataatttaggaaagttatagtttagtagtaggtataaattatagtgtttgataaataggtattttaatatttgtatatttaatgtatattaggtaggtgtaaaatatttatatataattttattgatatttatgtagtataaaggtattaattttaaatattaaataatatttttatgtgttagtaatttatttgtattaaattttattgaaaaggtttttaatatattttttttataaatgttattttaagaaaaaagtatttttaatatt

SEQ ID NO: 366 - DNA, 965 bp, Homo Sapiens
gatcaattaagggcatcttagaagttaggcgttcccgctgcctcctttgagcacggaggccaccaacccctagggggaagagatgtagcgcgaggcaggggtgtcgtgctaagaaatttcgacgcttctggggactgaggacaaaggtgcggacacgaccccggggtacctggagttccgtgactcgcgccacggacggcacacctaggggctaatttctgctctgcctcaaagaacctcaagctagagtccttgcctccgcccacagccccgggatgccgctgctgcgctcaccgcacaggcagcgcccggaccggctgcagcagatcgcgcgctgcgcgttccaccgggagatggtggagacgctgaaaagcttctttcttgccactctggacgctgtgggcggcaagcgccttagtccctacctctgctgagctgaacgctcaggcacagtggaactgaaacccggttccctacctctgctgagctgaacgctcaggcacagtggaactgaaacccggttctgcgggatgtgagagctgttgaggtcacgcgtaattgggtgtgatggagggcgcctgttcgtgatgtgtgcaggtttgatgcaagcaggtcatcgtcgtgcgagtgtgtggatgcgaccgcccgagagactcggaggcaggcttgggacacgtttgagtgaacacctcaggatactcttctggccagtatctgttttttagtgtctgtgattcagagtgggcacatgttgggagacagtaatgggtttgggtgtgtgtaaatgagtgtgaccggaagcgagtgtgagcttgatctaggcagggaccacacagcactgtcacacctgcctgctctttagtagaggactgaagtgcgggggtgggggtacggggccggaatagaatgtctctgggacatcttggcaaacagcagccggaagcaaaggggcagctgtgcaaacg

SEQ ID NO: 367 - DNA, 965 bp, Artificial Sequence
  chemically treated genomic DNA (Homo sapiens)
gattaattaagggtattttagaagttaggcgttttcgttgttttttttgagtacggaggttattaatttttagggggaagagatgtagcgcgaggtaggggtgtcgtgttaagaaatttcgacgtttttggggattgaggataaaggtgcggatacgatttcggggtatttggagtttcgtgattcgcgttacggacggtatatttaggggttaatttttgttttgttttaaagaattttaagttagagtttttgttttcgtttatagtttcgggatgtcgttgttgcgtttatcgtataggtagcgttcggatcggttgtagtagatcgcgcgttgcgcgttttatcgggagatggtggagacgttgaaaagttttttttttgttattttggacgttgtgggcggtaagcgttttagtttttatttttgttgagttgaacgtttaggtatagtggaattgaaattcggttttttatttttgttgagttgaacgtttaggtatagtggaattgaaattcggttttgcgggatgtgagagttgttgaggttacgcgtaattgggtgtgatggagggcgtttgttcgtgatgtgtgtaggtttgatgtaagtaggttatcgtcgtgcgagtgtgtggatgcgatcgttcgagagattcggaggtaggtttgggatacgtttgagtgaatattttaggatatttttttggttagtatttgttttttagtgtttgtgatttagagtgggtatatgttgggagatagtaatgggtttgggtgtgtgtaaatgagtgtgatcggaagcgagtgtgagtttgatttaggtagggattatatagtattgttatatttgtttgttttttagtagaggattgaagtgcgggggtgggggtacggggtcggaatagaatgtttttgggatattttggtaaatagtagtcggaagtaaaggggtagttgtgtaaacg

SEQ ID NO: 368 - DNA, 965 bp, Artificial Sequence
  chemically treated genomic DNA (Homo sapiens)
cgtttgtatagttgtttttttgttttcggttgttgtttgttaagatgttttagagatattttatttcggtttcgtatttttattttcgtattttagttttttattaaagagtaggtaggtgtgatagtgttgtgtggtttttgtttagattaagtttatattcgttttcggttatatttatttatatatatttaaatttattattgttttttaatatgtgtttattttgaattatagatattaaaaaatagatattggttagaagagtattttgaggtgtttatttaaacgtgttttaagtttgttttcgagtttttcgggcggtcgtatttatatattcgtacgacgatgatttgtttgtattaaatttgtatatattacgaataggcgttttttattatatttaattacgcgtgattttaatagtttttatatttcgtagaatcgggttttagttttattgtgtttgagcgtttagtttagtagaggtagggaatcgggttttagttttattgtgtttgagcgtttagtttagtagaggtagggattaaggcgtttgtcgtttatagcgtttagagtggtaagaaagaagttttttagcgtttttattatttttcggtggaacgcgtagcgcgcgatttgttgtagtcggttcgggcgttgtttgtgcggtgagcgtagtagcggtatttcggggttgtgggcggaggtaaggattttagtttgaggttttttgaggtagagtagaaattagtttttaggtgtgtcgttcgtggcgcgagttacggaattttaggtatttcggggtcgtgttcgtatttttgtttttagtttttagaagcgtcgaaattttttagtacgatatttttgtttcgcgttatattttttttttttaggggttggtggttttcgtgtttaaaggaggtagcgggaacgtttaatttttaagatgtttttaattgatt

SEQ ID NO: 369 - DNA, 965 bp, Artificial Sequence
  chemically treated genomic DNA (Homo sapiens)
gattaattaagggtattttagaagttaggtgtttttgttgttttttttgagtatggaggttattaatttttagggggaagagatgtagtgtgaggtaggggtgttgtgttaagaaattttgatgtttttggggattgaggataaaggtgtggatatgattttggggtatttggagttttgtgatttgtgttatggatggtatatttaggggttaatttttgttttgttttaaagaattttaagttagagtttttgtttttgtttatagttttgggatgttgttgttgtgtttattgtataggtagtgtttggattggttgtagtagattgtgtgttgtgtgttttattgggagatggtggagatgttgaaaagttttttttttgttattttggatgttgtgggtggtaagtgttttagtttttatttttgttgagttgaatgtttaggtatagtggaattgaaatttggttttttatttttgttgagttgaatgtttaggtatagtggaattgaaatttggttttgtgggatgtgagagttgttgaggttatgtgtaattgggtgtgatggagggtgtttgtttgtgatgtgtgtaggtttgatgtaagtaggttattgttgtgtgagtgtgtggatgtgattgtttgagagatttggaggtaggtttgggatatgtttgagtgaatattttaggatatttttttggttagtatttgttttttagtgtttgtgatttagagtgggtatatgttgggagatagtaatgggtttgggtgtgtgtaaatgagtgtgattggaagtgagtgtgagtttgatttaggtagggattatatagtattgttatatttgtttgttttttagtagaggattgaagtgtgggggtgggggtatggggttggaatagaatgtttttgggatattttggtaaatagtagttggaagtaaaggggtagttgtgtaaatg

SEQ ID NO: 370 - DNA, 965 bp, Artificial Sequence
  chemically treated genomic DNA (Homo sapiens)
tgtttgtatagttgtttttttgtttttggttgttgtttgttaagatgttttagagatattttattttggttttgtatttttatttttgtattttagttttttattaaagagtaggtaggtgtgatagtgttgtgtggtttttgtttagattaagtttatatttgtttttggttatatttatttatatatatttaaatttattattgttttttaatatgtgtttattttgaattatagatattaaaaaatagatattggttagaagagtattttgaggtgtttatttaaatgtgttttaagtttgtttttgagttttttgggtggttgtatttatatatttgtatgatgatgatttgtttgtattaaatttgtatatattatgaataggtgttttttattatatttaattatgtgtgattttaatagtttttatattttgtagaattgggttttagttttattgtgtttgagtgtttagtttagtagaggtagggaattgggttttagttttattgtgtttgagtgtttagtttagtagaggtagggattaaggtgtttgttgtttatagtgtttagagtggtaagaaagaagttttttagtgtttttattattttttggtggaatgtgtagtgtgtgatttgttgtagttggtttgggtgttgtttgtgtggtgagtgtagtagtggtattttggggttgtgggtggaggtaaggattttagtttgaggttttttgaggtagagtagaaattagtttttaggtgtgttgtttgtggtgtgagttatggaattttaggtattttggggttgtgtttgtatttttgtttttagtttttagaagtgttgaaattttttagtatgatatttttgttttgtgttatattttttttttttaggggttggtggtttttgtgtttaaaggaggtagtgggaatgtttaatttttaagatgtttttaattgatt

SEQ ID NO: 371 - DNA, 20 bp, Homo Sapiens
ccttagtccctacctctgct

SEQ ID NO: 372 - DNA, 21 bp, Homo Sapiens
ctcatttacacacacccaaac

SEQ ID NO: 373 - DNA, 21 bp, Artificial Sequence
  primer example 2
aggttatcgtcgtgcgagtgt

SEQ ID NO: 374 - DNA, 24 bp, Artificial Sequence
  primer example 2
tcactcaaacgtatcccaaaccta

SEQ ID NO: 375 - DNA, 25 bp, Artificial Sequence
  probe example 2
cgaatctctcgaacgatcgcatcca

SEQ ID NO: 376 - DNA, 25 bp, Artificial Sequence
  control primer example 2
tggtgatggaggaggtttagtaagt

SEQ ID NO: 377 - DNA, 27 bp, Artificial Sequence
  control primer example 2
aaccaataaaacctactcctcccttaa

SEQ ID NO: 378 - DNA, 30 bp, Artificial Sequence
  control probe example 2
accaccacccaacacacaataacaaacaca

SEQ ID NO: 379 - DNA, 23 bp, Artificial Sequence
  primer example 3
ggatgtgagagttgttgaggtta

SEQ ID NO: 380 - DNA, 24 bp, Artificial Sequence
  primer example 3
acacacccaaacccattactatct

SEQ ID NO: 381 - DNA, 25 bp, Artificial Sequence
  probe example 3
acctccgaatctctcgaacgatcgc

SEQ ID NO: 382 - DNA, 28 bp, Artificial Sequence
  blocker oligonucleotide example 3
tgttgaggttatgtgtaattgggtgtga

SEQ ID NO: 383 - DNA, 20 bp, Artificial Sequence
  cdkn2a primer
ttgaaaattaagggttgagg

SEQ ID NO: 384 - DNA, 20 bp, Artificial Sequence
  cdkn2a primer
caccctctaataaccaacca

SEQ ID NO: 385 - DNA, 20 bp, Artificial Sequence
  cdkn2a primer
ggggttggttggttattaga

SEQ ID NO: 386 - DNA, 20 bp, Artificial Sequence
  cdkn2a primer
aaccctctacccacctaaat

SEQ ID NO: 387 - DNA, 24 bp, Artificial Sequence
  RASSF1 primer
acctctctacaaattacaaattca

SEQ ID NO: 388 - DNA, 20 bp, Artificial Sequence
  RASSF1 primer
agtttgggttagtttgggtt

SEQ ID NO: 389 - DNA, 24 bp, Artificial Sequence
  MYOD1 primer
attaggggtatagaggagtattga

SEQ ID NO: 390 - DNA, 22 bp, Artificial Sequence
  MYOD1 primer
cttacaaacccacaataaacaa

SEQ ID NO: 391 - DNA, 20 bp, Artificial Sequence
  WT1 primer
aaagggaaattaagtgttgt

SEQ ID NO: 392 - DNA, 19 bp, Artificial Sequence
  WT1 primer
taactaccctcaacttccc

SEQ ID NO: 393 - DNA, 20 bp, Artificial Sequence
  BRCA1 primer
tggatgggaattgtagtttt

SEQ ID NO: 394 - DNA, 19 bp, Artificial Sequence
  BRCA1 primer
ttaaccacccaatctaccc

SEQ ID NO: 395 - DNA, 21 bp, Artificial Sequence
  CCND2 primer
ttttggtatgtaggttggatg

SEQ ID NO: 396 - DNA, 21 bp, Artificial Sequence
  CCND2 primer
cctaacctccttcctttaact
